United States Patent Application Publication US 2026/0226457 A1, published August 6, 2026 (application 19/152,740).

The application's sequence listing, which the Patent Office published only in electronic form, follows.

SEQUENCE LISTING (4072 sequences)

SEQ ID NO: 1 - RNA, 17 nt, synthetic construct
  source 1..17: mol_type = other RNA
attaaagaaaatatcat

SEQ ID NO: 2 - RNA, 17 nt, synthetic construct
  source 1..17: mol_type = other RNA
atgcctggcaccattaa

SEQ ID NO: 3 - RNA, 17 nt, synthetic construct
  source 1..17: mol_type = other RNA
ttttcctggattatgcc

SEQ ID NO: 4 - RNA, 17 nt, synthetic construct
  source 1..17: mol_type = other RNA
tatctatattcatcata

SEQ ID NO: 5 - RNA, 17 nt, synthetic construct
  source 1..17: mol_type = other RNA
gtatctatattcatcat

SEQ ID NO: 6 - RNA, 17 nt, synthetic construct
  source 1..17: mol_type = other RNA
atcataggaaacaccaa

SEQ ID NO: 7 - RNA, 18 nt, synthetic construct
  source 1..18: mol_type = other RNA
cattaaagaaaatatcat

SEQ ID NO: 8 - RNA, 18 nt, synthetic construct
  source 1..18: mol_type = other RNA
tatgcctggcaccattaa

SEQ ID NO: 9 - RNA, 18 nt, synthetic construct
  source 1..18: mol_type = other RNA
gttttcctggattatgcc

SEQ ID NO: 10 - RNA, 18 nt, synthetic construct
  source 1..18: mol_type = other RNA
gtatctatattcatcata

SEQ ID NO: 11 - RNA, 18 nt, synthetic construct
  source 1..18: mol_type = other RNA
tgtatctatattcatcat

SEQ ID NO: 12 - RNA, 18 nt, synthetic construct
  source 1..18: mol_type = other RNA
catcataggaaacaccaa

SEQ ID NO: 13 - RNA, 19 nt, synthetic construct
  source 1..19: mol_type = other RNA
ccattaaagaaaatatcat

SEQ ID NO: 14 - RNA, 19 nt, synthetic construct
  source 1..19: mol_type = other RNA
ttatgcctggcaccattaa

SEQ ID NO: 15 - RNA, 19 nt, synthetic construct
  source 1..19: mol_type = other RNA
agttttcctggattatgcc

SEQ ID NO: 16 - RNA, 19 nt, synthetic construct
  source 1..19: mol_type = other RNA
tgtatctatattcatcata

SEQ ID NO: 17 - RNA, 19 nt, synthetic construct
  source 1..19: mol_type = other RNA
ctgtatctatattcatcat

SEQ ID NO: 18 - RNA, 19 nt, synthetic construct
  source 1..19: mol_type = other RNA
tcatcataggaaacaccaa

SEQ ID NO: 19 - RNA, 20 nt, synthetic construct
  source 1..20: mol_type = other RNA
accattaaagaaaatatcat

SEQ ID NO: 20 - RNA, 20 nt, synthetic construct
  source 1..20: mol_type = other RNA
attatgcctggcaccattaa

SEQ ID NO: 21 - RNA, 20 nt, synthetic construct
  source 1..20: mol_type = other RNA
cagttttcctggattatgcc

SEQ ID NO: 22 - RNA, 20 nt, synthetic construct
  source 1..20: mol_type = other RNA
ctgtatctatattcatcata

SEQ ID NO: 23 - RNA, 20 nt, synthetic construct
  source 1..20: mol_type = other RNA
tctgtatctatattcatcat

SEQ ID NO: 24 - RNA, 20 nt, synthetic construct
  source 1..20: mol_type = other RNA
ttcatcataggaaacaccaa

SEQ ID NO: 25 - RNA, 21 nt, synthetic construct
  source 1..21: mol_type = other RNA
caccattaaagaaaatatcat

SEQ ID NO: 26 - RNA, 21 nt, synthetic construct
  source 1..21: mol_type = other RNA
gattatgcctggcaccattaa

SEQ ID NO: 27 - RNA, 21 nt, synthetic construct
  source 1..21: mol_type = other RNA
tcagttttcctggattatgcc

SEQ ID NO: 28 - RNA, 21 nt, synthetic construct
  source 1..21: mol_type = other RNA
tctgtatctatattcatcata

SEQ ID NO: 29 - RNA, 21 nt, synthetic construct
  source 1..21: mol_type = other RNA
ttctgtatctatattcatcat

SEQ ID NO: 30 - RNA, 21 nt, synthetic construct
  source 1..21: mol_type = other RNA
attcatcataggaaacaccaa

SEQ ID NO: 31 - RNA, 22 nt, synthetic construct
  source 1..22: mol_type = other RNA
gcaccattaaagaaaatatcat

SEQ ID NO: 32 - RNA, 22 nt, synthetic construct
  source 1..22: mol_type = other RNA
ggattatgcctggcaccattaa

SEQ ID NO: 33 - RNA, 22 nt, synthetic construct
  source 1..22: mol_type = other RNA
ctcagttttcctggattatgcc

SEQ ID NO: 34 - RNA, 22 nt, synthetic construct
  source 1..22: mol_type = other RNA
ttctgtatctatattcatcata

SEQ ID NO: 35 - RNA, 22 nt, synthetic construct
  source 1..22: mol_type = other RNA
cttctgtatctatattcatcat

SEQ ID NO: 36 - RNA, 22 nt, synthetic construct
  source 1..22: mol_type = other RNA
tattcatcataggaaacaccaa

SEQ ID NO: 37-66 - skipped (30 entries)

SEQ ID NO: 67 - RNA, 10 nt, synthetic construct
  source 1..10: mol_type = other RNA
atattttctt

SEQ ID NO: 68 - RNA, 10 nt, synthetic construct
  source 1..10: mol_type = other RNA
atggtgccag

SEQ ID NO: 69 - RNA, 10 nt, synthetic construct
  source 1..10: mol_type = other RNA
ataatccagg

SEQ ID NO: 70 - RNA, 10 nt, synthetic construct
  source 1..10: mol_type = other RNA
gatgaatata

SEQ ID NO: 71 - RNA, 10 nt, synthetic construct
  source 1..10: mol_type = other RNA
atgaatatag

SEQ ID NO: 72 - RNA, 10 nt, synthetic construct
  source 1..10: mol_type = other RNA
gtgtttccta

SEQ ID NO: 73 - RNA, 11 nt, synthetic construct
  source 1..11: mol_type = other RNA
atattttcttt

SEQ ID NO: 74 - RNA, 11 nt, synthetic construct
  source 1..11: mol_type = other RNA
atggtgccagg

SEQ ID NO: 75 - RNA, 11 nt, synthetic construct
  source 1..11: mol_type = other RNA
ataatccagga

SEQ ID NO: 76 - RNA, 11 nt, synthetic construct
  source 1..11: mol_type = other RNA
gatgaatatag

SEQ ID NO: 77 - RNA, 11 nt, synthetic construct
  source 1..11: mol_type = other RNA
atgaatataga

SEQ ID NO: 78 - RNA, 11 nt, synthetic construct
  source 1..11: mol_type = other RNA
gtgtttcctat

SEQ ID NO: 79 - RNA, 12 nt, synthetic construct
  source 1..12: mol_type = other RNA
atattttcttta

SEQ ID NO: 80 - RNA, 12 nt, synthetic construct
  source 1..12: mol_type = other RNA
atggtgccaggc

SEQ ID NO: 81 - RNA, 12 nt, synthetic construct
  source 1..12: mol_type = other RNA
ataatccaggaa

SEQ ID NO: 82 - RNA, 12 nt, synthetic construct
  source 1..12: mol_type = other RNA
gatgaatataga

SEQ ID NO: 83 - RNA, 12 nt, synthetic construct
  source 1..12: mol_type = other RNA
atgaatatagat

SEQ ID NO: 84 - RNA, 12 nt, synthetic construct
  source 1..12: mol_type = other RNA
gtgtttcctatg

SEQ ID NO: 85 - RNA, 13 nt, synthetic construct
  source 1..13: mol_type = other RNA
atattttctttaa

SEQ ID NO: 86 - RNA, 13 nt, synthetic construct
  source 1..13: mol_type = other RNA
atggtgccaggca

SEQ ID NO: 87 - RNA, 13 nt, synthetic construct
  source 1..13: mol_type = other RNA
ataatccaggaaa

SEQ ID NO: 88 - RNA, 13 nt, synthetic construct
  source 1..13: mol_type = other RNA
gatgaatatagat

SEQ ID NO: 89 - RNA, 13 nt, synthetic construct
  source 1..13: mol_type = other RNA
atgaatatagata

SEQ ID NO: 90 - RNA, 13 nt, synthetic construct
  source 1..13: mol_type = other RNA
gtgtttcctatga

SEQ ID NO: 91 - RNA, 14 nt, synthetic construct
  source 1..14: mol_type = other RNA
atattttctttaat

SEQ ID NO: 92 - RNA, 14 nt, synthetic construct
  source 1..14: mol_type = other RNA
atggtgccaggcat

SEQ ID NO: 93 - RNA, 14 nt, synthetic construct
  source 1..14: mol_type = other RNA
ataatccaggaaaa

SEQ ID NO: 94 - RNA, 14 nt, synthetic construct
  source 1..14: mol_type = other RNA
gatgaatatagata

SEQ ID NO: 95 - RNA, 14 nt, synthetic construct
  source 1..14: mol_type = other RNA
atgaatatagatac

SEQ ID NO: 96 - RNA, 14 nt, synthetic construct
  source 1..14: mol_type = other RNA
gtgtttcctatgat

SEQ ID NO: 97 - RNA, 15 nt, synthetic construct
  source 1..15: mol_type = other RNA
atattttctttaatg

SEQ ID NO: 98 - RNA, 15 nt, synthetic construct
  source 1..15: mol_type = other RNA
atggtgccaggcata

SEQ ID NO: 99 - RNA, 15 nt, synthetic construct
  source 1..15: mol_type = other RNA
ataatccaggaaaac

SEQ ID NO: 100 - RNA, 15 nt, synthetic construct
  source 1..15: mol_type = other RNA
gatgaatatagatac

SEQ ID NO: 101 - RNA, 15 nt, synthetic construct
  source 1..15: mol_type = other RNA
atgaatatagataca

SEQ ID NO: 102 - RNA, 15 nt, synthetic construct
  source 1..15: mol_type = other RNA
gtgtttcctatgatg

SEQ ID NO: 103 - RNA, 16 nt, synthetic construct
  source 1..16: mol_type = other RNA
atattttctttaatgg

SEQ ID NO: 104 - RNA, 16 nt, synthetic construct
  source 1..16: mol_type = other RNA
atggtgccaggcataa

SEQ ID NO: 105 - RNA, 16 nt, synthetic construct
  source 1..16: mol_type = other RNA
ataatccaggaaaact

SEQ ID NO: 106 - RNA, 16 nt, synthetic construct
  source 1..16: mol_type = other RNA
gatgaatatagataca

SEQ ID NO: 107 - RNA, 16 nt, synthetic construct
  source 1..16: mol_type = other RNA
atgaatatagatacag

SEQ ID NO: 108 - RNA, 16 nt, synthetic construct
  source 1..16: mol_type = other RNA
gtgtttcctatgatga

SEQ ID NO: 109 - RNA, 17 nt, synthetic construct
  source 1..17: mol_type = other RNA
atattttctttaatggt

SEQ ID NO: 110 - RNA, 17 nt, synthetic construct
  source 1..17: mol_type = other RNA
atggtgccaggcataat

SEQ ID NO: 111 - RNA, 17 nt, synthetic construct
  source 1..17: mol_type = other RNA
ataatccaggaaaactg

SEQ ID NO: 112 - RNA, 17 nt, synthetic construct
  source 1..17: mol_type = other RNA
gatgaatatagatacag

SEQ ID NO: 113 - RNA, 17 nt, synthetic construct
  source 1..17: mol_type = other RNA
atgaatatagatacaga

SEQ ID NO: 114 - RNA, 17 nt, synthetic construct
  source 1..17: mol_type = other RNA
gtgtttcctatgatgaa

SEQ ID NO: 115 - RNA, 18 nt, synthetic construct
  source 1..18: mol_type = other RNA
atattttctttaatggtg

SEQ ID NO: 116 - RNA, 18 nt, synthetic construct
  source 1..18: mol_type = other RNA
atggtgccaggcataatc

SEQ ID NO: 117 - RNA, 18 nt, synthetic construct
  source 1..18: mol_type = other RNA
ataatccaggaaaactga

SEQ ID NO: 118 - RNA, 18 nt, synthetic construct
  source 1..18: mol_type = other RNA
gatgaatatagatacaga

SEQ ID NO: 119 - RNA, 18 nt, synthetic construct
  source 1..18: mol_type = other RNA
atgaatatagatacagaa

SEQ ID NO: 120 - RNA, 18 nt, synthetic construct
  source 1..18: mol_type = other RNA
gtgtttcctatgatgaat

SEQ ID NO: 121 - RNA, 19 nt, synthetic construct
  source 1..19: mol_type = other RNA
atattttctttaatggtgc

SEQ ID NO: 122 - RNA, 19 nt, synthetic construct
  source 1..19: mol_type = other RNA
atggtgccaggcataatcc

SEQ ID NO: 123 - RNA, 19 nt, synthetic construct
  source 1..19: mol_type = other RNA
ataatccaggaaaactgag

SEQ ID NO: 124 - RNA, 19 nt, synthetic construct
  source 1..19: mol_type = other RNA
gatgaatatagatacagaa

SEQ ID NO: 125 - RNA, 19 nt, synthetic construct
  source 1..19: mol_type = other RNA
atgaatatagatacagaag

SEQ ID NO: 126 - RNA, 19 nt, synthetic construct
  source 1..19: mol_type = other RNA
gtgtttcctatgatgaata

SEQ ID NO: 127 - RNA, 10 nt, synthetic construct
  source 1..10: mol_type = other RNA
accaaagatg

SEQ ID NO: 128 - RNA, 10 nt, synthetic construct
  source 1..10: mol_type = other RNA
atcatctttg

SEQ ID NO: 129 - RNA, 11 nt, synthetic construct
  source 1..11: mol_type = other RNA
tatcatctttg

SEQ ID NO: 130 - RNA, 12 nt, synthetic construct
  source 1..12: mol_type = other RNA
atatcatctttg

SEQ ID NO: 131 - RNA, 13 nt, synthetic construct
  source 1..13: mol_type = other RNA
aacaccaaagatg

SEQ ID NO: 132 - RNA, 13 nt, synthetic construct
  source 1..13: mol_type = other RNA
aatatcatctttg

SEQ ID NO: 133 - RNA, 13 nt, synthetic construct
  source 1..13: mol_type = other RNA
cacaccaaagatg

SEQ ID NO: 134 - RNA, 13 nt, synthetic construct
  source 1..13: mol_type = other RNA
aacaccgaagatg

SEQ ID NO: 135 - RNA, 13 nt, synthetic construct
  source 1..13: mol_type = other RNA
gacaccaaagatg

SEQ ID NO: 136 - RNA, 13 nt, synthetic construct
  source 1..13: mol_type = other RNA
aacaccaaagatt

SEQ ID NO: 137 - RNA, 13 nt, synthetic construct
  source 1..13: mol_type = other RNA
aaccccaaagatg

SEQ ID NO: 138 - RNA, 13 nt, synthetic construct
  source 1..13: mol_type = other RNA
tacaccaaagatg

SEQ ID NO: 139 - RNA, 13 nt, synthetic construct
  source 1..13: mol_type = other RNA
aacgccaaagatg

SEQ ID NO: 140 - RNA, 13 nt, synthetic construct
  source 1..13: mol_type = other RNA
aactccaaagatg

SEQ ID NO: 141 - RNA, 13 nt, synthetic construct
  source 1..13: mol_type = other RNA
aacaccaaagata

SEQ ID NO: 142 - RNA, 14 nt, synthetic construct
  source 1..14: mol_type = other RNA
aaatatcatctttg

SEQ ID NO: 143 - RNA, 15 nt, synthetic construct
  source 1..15: mol_type = other RNA
aaaatatcatctttg

SEQ ID NO: 144 - RNA, 16 nt, synthetic construct
  source 1..16: mol_type = other RNA
ggaaacaccaaagatg

SEQ ID NO: 145 - RNA, 16 nt, synthetic construct
  source 1..16: mol_type = other RNA
gaaaatatcatctttg

SEQ ID NO: 146 - RNA, 17 nt, synthetic construct
  source 1..17: mol_type = other RNA
agaaaatatcatctttg

SEQ ID NO: 147 - RNA, 18 nt, synthetic construct
  source 1..18: mol_type = other RNA
aagaaaatatcatctttg

SEQ ID NO: 148 - RNA, 18 nt, synthetic construct
  source 1..18: mol_type = other RNA
aagaaaacattatatttg

SEQ ID NO: 149 - RNA, 18 nt, synthetic construct
  source 1..18: mol_type = other RNA
aagaaaatatcatatttg

SEQ ID NO: 150 - RNA, 18 nt, synthetic construct
  source 1..18: mol_type = other RNA
aagaaaacataatattcg

SEQ ID NO: 151 - RNA, 18 nt, synthetic construct
  source 1..18: mol_type = other RNA
aagaaaacattatctttg

SEQ ID NO: 152 - RNA, 18 nt, synthetic construct
  source 1..18: mol_type = other RNA
aagaaaatatcatttttg

SEQ ID NO: 153 - RNA, 18 nt, synthetic construct
  source 1..18: mol_type = other RNA
aggaaaacattatcttcg

SEQ ID NO: 154 - RNA, 18 nt, synthetic construct
  source 1..18: mol_type = other RNA
aagaaaatattatcttcg

SEQ ID NO: 155 - RNA, 18 nt, synthetic construct
  source 1..18: mol_type = other RNA
aggagaacatcatcttcg

SEQ ID NO: 156 - RNA, 18 nt, synthetic construct
  source 1..18: mol_type = other RNA
aagaaaacatcatctttg

SEQ ID NO: 157 - RNA, 18 nt, synthetic construct
  source 1..18: mol_type = other RNA
aagaaaatattatattcg

SEQ ID NO: 158 - RNA, 18 nt, synthetic construct
  source 1..18: mol_type = other RNA
aagaaaatatcatattcg

SEQ ID NO: 159 - RNA, 18 nt, synthetic construct
  source 1..18: mol_type = other RNA
aagaaaatataatatttg

SEQ ID NO: 160 - RNA, 18 nt, synthetic construct
  source 1..18: mol_type = other RNA
aagaaaacataatatttg

SEQ ID NO: 161 - RNA, 18 nt, synthetic construct
  source 1..18: mol_type = other RNA
aagaaaatataatctttg

SEQ ID NO: 162 - RNA, 18 nt, synthetic construct
  source 1..18: mol_type = other RNA
aagaaaatataatcttcg

SEQ ID NO: 163 - RNA, 18 nt, synthetic construct
  source 1..18: mol_type = other RNA
aagaaaacatcatatttg

SEQ ID NO: 164 - RNA, 18 nt, synthetic construct
  source 1..18: mol_type = other RNA
aagaaaacatcatcttcg

SEQ ID NO: 165 - RNA, 18 nt, synthetic construct
  source 1..18: mol_type = other RNA
aagaaaatatcatcttcg

SEQ ID NO: 166 - RNA, 18 nt, synthetic construct
  source 1..18: mol_type = other RNA
aagaaaacatcatattcg

SEQ ID NO: 167 - RNA, 18 nt, synthetic construct
  source 1..18: mol_type = other RNA
aagaaaacattatattcg

SEQ ID NO: 168 - RNA, 18 nt, synthetic construct
  source 1..18: mol_type = other RNA
aagaaaatattatatttg

SEQ ID NO: 169 - RNA, 18 nt, synthetic construct
  source 1..18: mol_type = other RNA
aagaaaatataatattcg

SEQ ID NO: 170 - RNA, 18 nt, synthetic construct
  source 1..18: mol_type = other RNA
aagaaaacataatcttcg

SEQ ID NO: 171 - RNA, 18 nt, synthetic construct
  source 1..18: mol_type = other RNA
aagaaaacattatcttcg

SEQ ID NO: 172 - RNA, 18 nt, synthetic construct
  source 1..18: mol_type = other RNA
aagaaaatattatctttg

SEQ ID NO: 173 - RNA, 18 nt, synthetic construct
  source 1..18: mol_type = other RNA
aagaaaacataatctttg

SEQ ID NO: 174 - RNA, 18 nt, synthetic construct
  source 1..18: mol_type = other RNA
aagaaaatatcattttcg

SEQ ID NO: 175 - RNA, 19 nt, synthetic construct
  source 1..19: mol_type = other RNA
ataggaaacaccaaagatg

SEQ ID NO: 176 - RNA, 19 nt, synthetic construct
  source 1..19: mol_type = other RNA
aaagaaaatatcatctttg

SEQ ID NO: 177 - RNA, 20 nt, synthetic construct
  source 1..20: mol_type = other RNA
cataggaaacaccaaagatg

SEQ ID NO: 178 - RNA, 20 nt, synthetic construct
  source 1..20: mol_type = other RNA
catctttggtgtttcctatg

SEQ ID NO: 179 - RNA, 20 nt, synthetic construct
  source 1..20: mol_type = other RNA
taaagaaaatatcatctttg

SEQ ID NO: 180 - RNA, 20 nt, synthetic construct
  source 1..20: mol_type = other RNA
cataggaaacgccgaagatg

SEQ ID NO: 181 - RNA, 20 nt, synthetic construct
  source 1..20: mol_type = other RNA
cataggagacaccaaagatg

SEQ ID NO: 182 - RNA, 20 nt, synthetic construct
  source 1..20: mol_type = other RNA
cataggacacaccgaagatg

SEQ ID NO: 183 - RNA, 20 nt, synthetic construct
  source 1..20: mol_type = other RNA
cataggacactccaaagatg

SEQ ID NO: 184 - RNA, 20 nt, synthetic construct
  source 1..20: mol_type = other RNA
cataggatacaccaaagatg

SEQ ID NO: 185 - RNA, 20 nt, synthetic construct
  source 1..20: mol_type = other RNA
cataggaaactccaaagata

SEQ ID NO: 186 - RNA, 20 nt, synthetic construct
  source 1..20: mol_type = other RNA
cataggatactccaaagatg

SEQ ID NO: 187 - RNA, 20 nt, synthetic construct
  source 1..20: mol_type = other RNA
cataggagacaccaaagata

SEQ ID NO: 188 - RNA, 20 nt, synthetic construct
  source 1..20: mol_type = other RNA
cataggaaaccccaaagatt

SEQ ID NO: 189 - RNA, 20 nt, synthetic construct
  source 1..20: mol_type = other RNA
cataggaaacaccgaagatt

SEQ ID NO: 190 - RNA, 20 nt, synthetic construct
  source 1..20: mol_type = other RNA
cataggagacgccaaagatg

SEQ ID NO: 191 - RNA, 20 nt, synthetic construct
  source 1..20: mol_type = other RNA
catatgaaacaccaaagatg

SEQ ID NO: 192 - RNA, 20 nt, synthetic construct
  source 1..20: mol_type = other RNA
cataggaaacaccaaagata

SEQ ID NO: 193 - RNA, 20 nt, synthetic construct
  source 1..20: mol_type = other RNA
cataggaaaccccaaagata

SEQ ID NO: 194 - RNA, 20 nt, synthetic construct
  source 1..20: mol_type = other RNA
cataggacacgccaaagatg

SEQ ID NO: 195 - RNA, 20 nt, synthetic construct
  source 1..20: mol_type = other RNA
cataggatacaccaaagata

SEQ ID NO: 196 - RNA, 20 nt, synthetic construct
  source 1..20: mol_type = other RNA
cataggagacaccgaagatg

SEQ ID NO: 197 - RNA, 20 nt, synthetic construct
  source 1..20: mol_type = other RNA
cataggacacaccaaagata

SEQ ID NO: 198 - RNA, 20 nt, synthetic construct
  source 1..20: mol_type = other RNA
cataggaaacaccgaagatg

SEQ ID NO: 199 - RNA, 20 nt, synthetic construct
  source 1..20: mol_type = other RNA
cataggaaacgccaaagatg

SEQ ID NO: 200 - RNA, 20 nt, synthetic construct
  source 1..20: mol_type = other RNA
cataggaaactccgaagatg

SEQ ID NO: 201 - RNA, 20 nt, synthetic construct
  source 1..20: mol_type = other RNA
cataagaaacaccaaagatg

SEQ ID NO: 202 - RNA, 20 nt, synthetic construct
  source 1..20: mol_type = other RNA
cataggagactccaaagatg

SEQ ID NO: 203 - RNA, 20 nt, synthetic construct
  source 1..20: mol_type = other RNA
cataggaaactccaaagatt

SEQ ID NO: 204 - RNA, 20 nt, synthetic construct
  source 1..20: mol_type = other RNA
cataggaaaccccaaagatg

SEQ ID NO: 205 - RNA, 20 nt, synthetic construct
  source 1..20: mol_type = other RNA
cataggaaacgccaaagata

SEQ ID NO: 206 - RNA, 20 nt, synthetic construct
  source 1..20: mol_type = other RNA
cgtaggaaacaccaaagatg

SEQ ID NO: 207 - RNA, 20 nt, synthetic construct
  source 1..20: mol_type = other RNA
cataggataccccaaagatg

SEQ ID NO: 208 - RNA, 20 nt, synthetic construct
  source 1..20: mol_type = other RNA
cataggaaactccaaagatg

SEQ ID NO: 209 - RNA, 20 nt, synthetic construct
  source 1..20: mol_type = other RNA
cataggagacaccaaagatt

SEQ ID NO: 210 - RNA, 20 nt, synthetic construct
  source 1..20: mol_type = other RNA
cataggatacaccaaagatt

SEQ ID NO: 211 - RNA, 20 nt, synthetic construct
  source 1..20: mol_type = other RNA
cataggacacaccaaagatt

SEQ ID NO: 212 - RNA, 20 nt, synthetic construct
  source 1..20: mol_type = other RNA
cataggacacaccaaagatg

SEQ ID NO: 213 - RNA, 20 nt, synthetic construct
  source 1..20: mol_type = other RNA
cataggacaccccaaagatg

SEQ ID NO: 214 - RNA, 20 nt, synthetic construct
  source 1..20: mol_type = other RNA
cataggagaccccaaagatg

SEQ ID NO: 215 - RNA, 20 nt, synthetic construct
  source 1..20: mol_type = other RNA
cataggaaacaccaaagatt

SEQ ID NO: 216 - RNA, 20 nt, synthetic construct
  source 1..20: mol_type = other RNA
cataggaaaccccgaagatg

SEQ ID NO: 217 - RNA, 20 nt, synthetic construct
  source 1..20: mol_type = other RNA
catacgaaacaccaaagatg

SEQ ID NO: 218 - RNA, 20 nt, synthetic construct
  source 1..20: mol_type = other RNA
cataggatacgccaaagatg

SEQ ID NO: 219 - RNA, 20 nt, synthetic construct
  source 1..20: mol_type = other RNA
cataggaaacgccaaagatt

SEQ ID NO: 220 - RNA, 20 nt, synthetic construct
  source 1..20: mol_type = other RNA
cataggatacaccgaagatg

SEQ ID NO: 221 - RNA, 20 nt, synthetic construct
  source 1..20: mol_type = other RNA
cataggaaacaccgaagata

SEQ ID NO: 222 - RNA, 21 nt, synthetic construct
  source 1..21: mol_type = other RNA
atcatctttggtgtttcctat

SEQ ID NO: 223 - RNA, 21 nt, synthetic construct
  source 1..21: mol_type = other RNA
tcatctttggtgtttcctatg

SEQ ID NO: 224 - RNA, 21 nt, synthetic construct
  source 1..21: mol_type = other RNA
ttaaagaaaatatcatctttg

SEQ ID NO: 225 - RNA, 22 nt, synthetic construct
  source 1..22: mol_type = other RNA
atcataggaaacaccaaagatg

SEQ ID NO: 226 - RNA, 22 nt, synthetic construct
  source 1..22: mol_type = other RNA
accaaagatgatattttcttta

SEQ ID NO: 227 - RNA, 22 nt, synthetic construct
  source 1..22: mol_type = other RNA
atcatctttggtgtttcctatg

SEQ ID NO: 228 - RNA, 22 nt, synthetic construct
  source 1..22: mol_type = other RNA
attaaagaaaatatcatctttg

SEQ ID NO: 229 - RNA, 22 nt, synthetic construct
  source 1..22: mol_type = other RNA
attaaagagaatataatcttcg

SEQ ID NO: 230 - RNA, 22 nt, synthetic construct
  source 1..22: mol_type = other RNA
atcaaagaaaacatcatctttg

SEQ ID NO: 231 - RNA, 22 nt, synthetic construct
  source 1..22: mol_type = other RNA
attaaagaaaacatcatcttcg

SEQ ID NO: 232 - RNA, 22 nt, synthetic construct
  source 1..22: mol_type = other RNA
attaaagaaaacatcatctttg

SEQ ID NO: 233 - RNA, 22 nt, synthetic construct
  source 1..22: mol_type = other RNA
attaaagagaatattatctttg

SEQ ID NO: 234 - RNA, 22 nt, synthetic construct
  source 1..22: mol_type = other RNA
attaaggaaaatatcatctttg

SEQ ID NO: 235 - RNA, 22 nt, synthetic construct
  source 1..22: mol_type = other RNA
attaaggaaaatataatctttg

SEQ ID NO: 236 - RNA, 22 nt, synthetic construct
  source 1..22: mol_type = other RNA
ataaaagaaaatataatctttg

SEQ ID NO: 237 - RNA, 22 nt, synthetic construct
  source 1..22: mol_type = other RNA
attaaagaaaatatcattttcg

SEQ ID NO: 238 - RNA, 22 nt, synthetic construct
  source 1..22: mol_type = other RNA
attaaagagaacatcatatttg

SEQ ID NO: 239 - RNA, 22 nt, synthetic construct
  source 1..22: mol_type = other RNA
atcaaggaaaatatcatcttcg

SEQ ID NO: 240 - RNA, 22 nt, synthetic construct
  source 1..22: mol_type = other RNA
attaaagaaaacataatattcg

SEQ ID NO: 241 - RNA, 22 nt, synthetic construct
  source 1..22: mol_type = other RNA
attaaagagaacatcatctttg

SEQ ID NO: 242 - RNA, 22 nt, synthetic construct
  source 1..22: mol_type = other RNA
attaaagagaatatcatattcg

SEQ ID NO: 243 - RNA, 22 nt, synthetic construct
  source 1..22: mol_type = other RNA
attaaagaaaatatcatattcg

SEQ ID NO: 244 - RNA, 22 nt, synthetic construct
  source 1..22: mol_type = other RNA
attaaagaaaatatcatatttg

SEQ ID NO: 245 - RNA, 22 nt, synthetic construct
  source 1..22: mol_type = other RNA
attaaagagaatataatctttg

SEQ ID NO: 246 - RNA, 22 nt, synthetic construct
  source 1..22: mol_type = other RNA
atcaaagaaaatattatctttg

SEQ ID NO: 247 - RNA, 22 nt, synthetic construct
  source 1..22: mol_type = other RNA
attaaagaaaacataatctttg

SEQ ID NO: 248 - RNA, 22 nt, synthetic construct
  source 1..22: mol_type = other RNA
attaaagagaatatcatcttcg

SEQ ID NO: 249 - RNA, 22 nt, synthetic construct
  source 1..22: mol_type = other RNA
attaaagagaatatcatctttg

SEQ ID NO: 250 - RNA, 22 nt, synthetic construct
  source 1..22: mol_type = other RNA
attaaagaaaacattatctttg

SEQ ID NO: 251 - RNA, 22 nt, synthetic construct
  source 1..22: mol_type = other RNA
attaaagagaacataatatttg

SEQ ID NO: 252 - RNA, 22 nt, synthetic construct
  source 1..22: mol_type = other RNA
ataaaagagaatatcatctttg

SEQ ID NO: 253 - RNA, 22 nt, synthetic construct
  source 1..22: mol_type = other RNA
attaaagaaaatatcatcttcg

SEQ ID NO: 254 - RNA, 22 nt, synthetic construct
  source 1..22: mol_type = other RNA
attaaagagaacattatattcg

SEQ ID NO: 255 - RNA, 22 nt, synthetic construct
  source 1..22: mol_type = other RNA
attaaagagaacattatatttg

SEQ ID NO: 256 - RNA, 22 nt, synthetic construct
  source 1..22: mol_type = other RNA
atcaaagagaacataatcttcg

SEQ ID NO: 257 - RNA, 22 nt, synthetic construct
  source 1..22: mol_type = other RNA
attaaagaaaacatcatatttg

SEQ ID NO: 258 - RNA, 22 nt, synthetic construct
  source 1..22: mol_type = other RNA
attaaagaaaacattatatttg

SEQ ID NO: 259 - RNA, 22 nt, synthetic construct
  source 1..22: mol_type = other RNA
attaaagagaacatcatattcg

SEQ ID NO: 260 - RNA, 22 nt, synthetic construct
  source 1..22: mol_type = other RNA
attaaagagaacattatcttcg

SEQ ID NO: 261 - RNA, 22 nt, synthetic construct
  source 1..22: mol_type = other RNA
attaaagagaatatcatatttg

SEQ ID NO: 262 - RNA, 22 nt, synthetic construct
  source 1..22: mol_type = other RNA
attaaagaaaatattatatttg

SEQ ID NO: 263 - RNA, 22 nt, synthetic construct
  source 1..22: mol_type = other RNA
attaaagaaaacatcatattcg

SEQ ID NO: 264 - RNA, 22 nt, synthetic construct
  source 1..22: mol_type = other RNA
ataaaagaaaatatcatctttg

SEQ ID NO: 265 - RNA, 22 nt, synthetic construct
  source 1..22: mol_type = other RNA
attaaagaaaatattatattcg

SEQ ID NO: 266 - RNA, 22 nt, synthetic construct
  source 1..22: mol_type = other RNA
ataaaagaaaacatcatctttg

SEQ ID NO: 267 - RNA, 22 nt, synthetic construct
  source 1..22: mol_type = other RNA
atcaaggaaaatatcatattcg

SEQ ID NO: 268 - RNA, 22 nt, synthetic construct
  source 1..22: mol_type = other RNA
atcaaagagaatatcatctttg

SEQ ID NO: 269 - RNA, 22 nt, synthetic construct
  source 1..22: mol_type = other RNA
attaaagaaaatatcatttttg

SEQ ID NO: 270 - RNA, 22 nt, synthetic construct
  source 1..22: mol_type = other RNA
ataaaggaaaatatcatctttg

SEQ ID NO: 271 - RNA, 22 nt, synthetic construct
  source 1..22: mol_type = other RNA
attaaagaaaatataatattcg

SEQ ID NO: 272 - RNA, 22 nt, synthetic construct
  source 1..22: mol_type = other RNA
attaaagaaaacataatatttg

SEQ ID NO: 273 - RNA, 22 nt, synthetic construct
  source 1..22: mol_type = other RNA
attaaagagaacatcatcttcg

SEQ ID NO: 274 - RNA, 22 nt, synthetic construct
  source 1..22: mol_type = other RNA
attaaggaaaatattatctttg

SEQ ID NO: 275 - RNA, 22 nt, synthetic construct
  source 1..22: mol_type = other RNA
attaaagagaacataatattcg

SEQ ID NO: 276 - RNA, 22 nt, synthetic construct
  source 1..22: mol_type = other RNA
attaaagaaaacattatattcg

SEQ ID NO: 277 - RNA, 22 nt, synthetic construct
  source 1..22: mol_type = other RNA
ataaaggagaacataatattcg

SEQ ID NO: 278 - RNA, 22 nt, synthetic construct
  source 1..22: mol_type = other RNA
atcaaagagaacataatctttg

SEQ ID NO: 279 - RNA, 22 nt, synthetic construct
  source 1..22: mol_type = other RNA
attaaagaaaatataatcttcg

SEQ ID NO: 280 - RNA, 22 nt, synthetic construct
  source 1..22: mol_type = other RNA
atcaaggaaaatatcatctttg

SEQ ID NO: 281 - RNA, 22 nt, synthetic construct
  source 1..22: mol_type = other RNA
atcaaagaaaatataatctttg

SEQ ID NO: 282 - RNA, 22 nt, synthetic construct
  source 1..22: mol_type = other RNA
ataaaagaaaatatcatcttcg

SEQ ID NO: 283 - RNA, 22 nt, synthetic construct
  source 1..22: mol_type = other RNA
ataaaagaaaatattatctttg

SEQ ID NO: 284 - RNA, 22 nt, synthetic construct
  source 1..22: mol_type = other RNA
atcaaagaaaatatcatcttcg

SEQ ID NO: 285 - RNA, 22 nt, synthetic construct
  source 1..22: mol_type = other RNA
attaaagaaaatattatcttcg

SEQ ID NO: 286 - RNA, 22 nt, synthetic construct
  source 1..22: mol_type = other RNA
attaaagaaaatataatctttg

SEQ ID NO: 287 - RNA, 22 nt, synthetic construct
  source 1..22: mol_type = other RNA
attaaagagaatataatatttg

SEQ ID NO: 288 - RNA, 22 nt, synthetic construct
  source 1..22: mol_type = other RNA
attaaagaaaacattatcttcg

SEQ ID NO: 289 - RNA, 22 nt, synthetic construct
  source 1..22: mol_type = other RNA
ataaaagagaacattatatttg

SEQ ID NO: 290 - RNA, 22 nt, synthetic construct
  source 1..22: mol_type = other RNA
attaaagagaatattatatttg

SEQ ID NO: 291 - RNA, 22 nt, synthetic construct
  source 1..22: mol_type = other RNA
attaaagaaaatattatctttg

SEQ ID NO: 292 - RNA, 22 nt, synthetic construct
  source 1..22: mol_type = other RNA
attaaagaaaatataatatttg

SEQ ID NO: 293 - RNA, 22 nt, synthetic construct
  source 1..22: mol_type = other RNA
attaaggaaaatataatatttg

SEQ ID NO: 294 - RNA, 22 nt, synthetic construct
  source 1..22: mol_type = other RNA
attaaggaaaacatcatctttg

SEQ ID NO: 295 - RNA, 22 nt, synthetic construct
  source 1..22: mol_type = other RNA
attaaagagaacataatctttg

SEQ ID NO: 296 - RNA, 22 nt, synthetic construct
  source 1..22: mol_type = other RNA
attaaagagaatataatattcg

SEQ ID NO: 297 - RNA, 22 nt, synthetic construct
  source 1..22: mol_type = other RNA
attaaggaaaatatcatcttcg

SEQ ID NO: 298 - RNA, 22 nt, synthetic construct
  source 1..22: mol_type = other RNA
attaaagaaaacataatcttcg

SEQ ID NO: 299 - RNA, 22 nt, synthetic construct
  source 1..22: mol_type = other RNA
attaaagagaatattatattcg

SEQ ID NO: 300 - RNA, 22 nt, synthetic construct
  source 1..22: mol_type = other RNA
atcaaggagaacattatattcg

SEQ ID NO: 301 - RNA, 22 nt, synthetic construct
  source 1..22: mol_type = other RNA
atcaaggagaatataatcttcg

SEQ ID NO: 302 - RNA, 22 nt, synthetic construct
  source 1..22: mol_type = other RNA
atcaaagaaaatatcatctttg

SEQ ID NO: 303 - RNA, 22 nt, synthetic construct
  source 1..22: mol_type = other RNA
atcaaggagaacatcatcttcg

SEQ ID NO: 304 - RNA, 22 nt, synthetic construct
  source 1..22: mol_type = other RNA
attaaagagaatattatcttcg

SEQ ID NO: 305 - RNA, 22 nt, synthetic construct
  source 1..22: mol_type = other RNA
attaaggagaatatcatctttg

SEQ ID NO: 306 - RNA, 22 nt, synthetic construct
  source 1..22: mol_type = other RNA
atcaaggagaatataatctttg

SEQ ID NO: 307 - RNA, 22 nt, synthetic construct
  source 1..22: mol_type = other RNA
attaaagagaacattatctttg

SEQ ID NO: 308 - RNA, 22 nt, synthetic construct
  source 1..22: mol_type = other RNA
attaaagagaacataatcttcg

SEQ ID NO: 309 - RNA, 23 nt, synthetic construct
  source 1..23: mol_type = other RNA
tatcatctttggtgtttcctatg

SEQ ID NO: 310 - RNA, 23 nt, synthetic construct
  source 1..23: mol_type = other RNA
cattaaagaaaatatcatctttg

SEQ ID NO: 311 - RNA, 24 nt, synthetic construct
  source 1..24: mol_type = other RNA
atatcatctttggtgtttcctatg

SEQ ID NO: 312 - RNA, 24 nt, synthetic construct
  source 1..24: mol_type = other RNA
ccattaaagaaaatatcatctttg

SEQ ID NO: 313 - RNA, 25 nt, synthetic construct
  source 1..25: mol_type = other RNA
ttcatcataggaaacaccaaagatg

SEQ ID NO: 314 - RNA, 25 nt, synthetic construct
  source 1..25: mol_type = other RNA
aatatcatctttggtgtttcctatg

SEQ ID NO: 315 - RNA, 25 nt, synthetic construct
  source 1..25: mol_type = other RNA
accattaaagaaaatatcatctttg

SEQ ID NO: 316 - RNA, 26 nt, synthetic construct
  source 1..26: mol_type = other RNA
aaatatcatctttggtgtttcctatg

SEQ ID NO: 317 - RNA, 26 nt, synthetic construct
  source 1..26: mol_type = other RNA
caccattaaagaaaatatcatctttg

SEQ ID NO: 318 - RNA, 27 nt, synthetic construct
  source 1..27: mol_type = other RNA
aaaatatcatctttggtgtttcctatg

SEQ ID NO: 319 - RNA, 27 nt, synthetic construct
  source 1..27: mol_type = other RNA
gcaccattaaagaaaatatcatctttg

SEQ ID NO: 320 - RNA, 28 nt, synthetic construct
  source 1..28: mol_type = other RNA
gaaaatatcatctttggtgtttcatatg

SEQ ID NO: 321 - RNA, 28 nt, synthetic construct
  source 1..28: mol_type = other RNA
gaaaatatcatctttggtgtttcctatg

SEQ ID NO: 322 - RNA, 28 nt, synthetic construct
  source 1..28: mol_type = other RNA
gaaaatatcatctttggtgtttcgtatg

SEQ ID NO: 323 - RNA, 28 nt, synthetic construct
  source 1..28: mol_type = other RNA
gaaaatatcatctttggtgtttcttatg

SEQ ID NO: 324 - RNA, 28 nt, synthetic construct
  source 1..28: mol_type = other RNA
ggcaccattaaagaaaatatcatctttg

SEQ ID NO: 325 - RNA, 28 nt, synthetic construct
  source 1..28: mol_type = other RNA
gaaaatatcatctttggtgtatcctatg

SEQ ID NO: 326 - RNA, 28 nt, synthetic construct
  source 1..28: mol_type = other RNA
gaaaatatcatctttggtgtctcctatg

SEQ ID NO: 327 - RNA, 28 nt, synthetic construct
  source 1..28: mol_type = other RNA
gaaaatatcatctttggcgtttcctatg

SEQ ID NO: 328 - RNA, 28 nt, synthetic construct
  source 1..28: mol_type = other RNA
gagaatatcatctttggtgtttcctatg

SEQ ID NO: 329 - RNA, 28 nt, synthetic construct
  source 1..28: mol_type = other RNA
gaaaatattatctttggtgtttcctatg

SEQ ID NO: 330 - RNA, 28 nt, synthetic construct
  source 1..28: mol_type = other RNA
gaaaatatcatctttggtgtgtcctatg

SEQ ID NO: 331 - RNA, 28 nt, synthetic construct
  source 1..28: mol_type = other RNA
gaaaatatcatctttggagtttcctatg

SEQ ID NO: 332 - RNA, 28 nt, synthetic construct
  source 1..28: mol_type = other RNA
gaaaatatcatcttcggtgtttcctatg

SEQ ID NO: 333 - RNA, 28 nt, synthetic construct
  source 1..28: mol_type = other RNA
gaaaatatcatctttggtgtttcctacg

SEQ ID NO: 334 - RNA, 28 nt, synthetic construct
  source 1..28: mol_type = other RNA
gaaaatataatctttggtgtttcctatg

SEQ ID NO: 335 - RNA, 28 nt, synthetic construct
  source 1..28: mol_type = other RNA
gaaaacatcatctttggtgtttcctatg

SEQ ID NO: 336 - RNA, 28 nt, synthetic construct
  source 1..28: mol_type = other RNA
gaaaatatcatctttggggtttcctatg

SEQ ID NO: 337 - RNA, 29 nt, synthetic construct
  source 1..29: mol_type = other RNA
agaaaatatcatctttggtgtttcctatg

SEQ ID NO: 338 - RNA, 29 nt, synthetic construct
  source 1..29: mol_type = other RNA
tggcaccattaaagaaaatatcatctttg

SEQ ID NO: 339 - RNA, 30 nt, synthetic construct
  source 1..30: mol_type = other RNA
aagaaaatatcatctttggtgtttcctatg

SEQ ID NO: 340 - RNA, 30 nt, synthetic construct
  source 1..30: mol_type = other RNA
ctggcaccattaaagaaaatatcatctttg

SEQ ID NO: 341 - RNA, 31 nt, synthetic construct
  source 1..31: mol_type = other RNA
aaagaaaatatcatctttggtgtttcctatg

SEQ ID NO: 342 - RNA, 31 nt, synthetic construct
  source 1..31: mol_type = other RNA
cctggcaccattaaagaaaatatcatctttg

SEQ ID NO: 343 - RNA, 32 nt, synthetic construct
  source 1..32: mol_type = other RNA
taaagaaaatatcatctttggtgtttcctatg

SEQ ID NO: 344 - RNA, 32 nt, synthetic construct
  source 1..32: mol_type = other RNA
gcctggcaccattaaagaaaatatcatctttg

SEQ ID NO: 345 - RNA, 33 nt, synthetic construct
  source 1..33: mol_type = other RNA
ccaaagatgatattttctttaatggtgccaggc

SEQ ID NO: 346 - RNA, 33 nt, synthetic construct
  source 1..33: mol_type = other RNA
ttaaagaaaatatcatctttggtgtttcctatg

SEQ ID NO: 347 - RNA, 33 nt, synthetic construct
  source 1..33: mol_type = other RNA
tgcctggcaccattaaagaaaatatcatctttg

SEQ ID NO: 348 - RNA, 34 nt, synthetic construct
  source 1..34: mol_type = other RNA
accaaagatgatattttctttaatggtgccaggc

SEQ ID NO: 349 - RNA, 34 nt, synthetic construct
  source 1..34: mol_type = other RNA
attaaagaaaatatcatctttggtgttagctatg

SEQ ID NO: 350 - RNA, 34 nt, synthetic construct
  source 1..34: mol_type = other RNA
attaaagaaaatatcatctttggtgttagttatg

SEQ ID NO: 351 - RNA, 34 nt, synthetic construct
  source 1..34: mol_type = other RNA
attaaagaaaatatcatctttggtgtttcatatg

SEQ ID NO: 352 - RNA, 34 nt, synthetic construct
  source 1..34: mol_type = other RNA
attaaagaaaatatcatctttggtgtttcctatg

SEQ ID NO: 353 - RNA, 34 nt, synthetic construct
  source 1..34: mol_type = other RNA
attaaagaaaatatcatctttggtgtttcgtatg

SEQ ID NO: 354 - RNA, 34 nt, synthetic construct
  source 1..34: mol_type = other RNA
attaaagaaaatatcatctttggtgtttcttatg

SEQ ID NO: 355 - RNA, 34 nt, synthetic construct
  source 1..34: mol_type = other RNA
atgcctggcaccattaaagaaaatatcatctttg

SEQ ID NO: 356 - RNA, 34 nt, synthetic construct
  source 1..34: mol_type = other RNA
attaaagaaaatatcatcttcggtgtttcatatg

SEQ ID NO: 357 - RNA, 34 nt, synthetic construct
  source 1..34: mol_type = other RNA
attaaagaaaatattatcttcggtgtttcctatg

SEQ ID NO: 358 - RNA, 34 nt, synthetic construct
  source 1..34: mol_type = other RNA
attaaagaaaatatcatctttggggtttcctacg

SEQ ID NO: 359 - RNA, 34 nt, synthetic construct
  source 1..34: mol_type = other RNA
attaaagaaaatatcatctttggcgtctcctatg

SEQ ID NO: 360 - RNA, 34 nt, synthetic construct
  source 1..34: mol_type = other RNA
attaaagaaaatatcatctttggagtttcatatg

SEQ ID NO: 361 - RNA, 34 nt, synthetic construct
  source 1..34: mol_type = other RNA
attaaagaaaatatcatctttggtgtgagctatg

SEQ ID NO: 362 - RNA, 34 nt, synthetic construct
  source 1..34: mol_type = other RNA
attaaagaaaatatcatcttcggtgtgtcctatg

SEQ ID NO: 363 - RNA, 34 nt, synthetic construct
  source 1..34: mol_type = other RNA
attaaagagaatatcatctttggtgtttcctacg

SEQ ID NO: 364 - RNA, 34 nt, synthetic construct
  source 1..34: mol_type = other RNA
ataaaggagaatatcatctttggtgtttcctatg

SEQ ID NO: 365 - RNA, 34 nt, synthetic construct
  source 1..34: mol_type = other RNA
attaaagaaaatatcatctttggtgtttcctacg

SEQ ID NO: 366 - RNA, 34 nt, synthetic construct
  source 1..34: mol_type = other RNA
attaaagagaatatcatctttggtgtctcctatg

SEQ ID NO: 367 - RNA, 34 nt, synthetic construct
  source 1..34: mol_type = other RNA
attaaagaaaatatcatcttcggtgtttcttatg

SEQ ID NO: 368 - RNA, 34 nt, synthetic construct
  source 1..34: mol_type = other RNA
attaaagaaaatatcatatttggtgtttcctacg

SEQ ID NO: 369 - RNA, 34 nt, synthetic construct
  source 1..34: mol_type = other RNA
attaaagaaaatataatcttcggtgtttcctatg

SEQ ID NO: 370 - RNA, 34 nt, synthetic construct
  source 1..34: mol_type = other RNA
attaaagagaatattatcttcggtgtttcctatg

SEQ ID NO: 371 - RNA, 34 nt, synthetic construct
  source 1..34: mol_type = other RNA
ataaaagagaacatcatcttcggcgtttcttacg

SEQ ID NO: 372 - RNA, 34 nt, synthetic construct
  source 1..34: mol_type = other RNA
attaaagaaaatattatctttggtgtttcatatg

SEQ ID NO: 373 - RNA, 34 nt, synthetic construct
  source 1..34: mol_type = other RNA
attaaagaaaacatcatctttggtgtttcctacg

SEQ ID NO: 374 - RNA, 34 nt, synthetic construct
  source 1..34: mol_type = other RNA
attaaagagaacattatcttcggtgtatcgtatg

SEQ ID NO: 375 - RNA, 34 nt, synthetic construct
  source 1..34: mol_type = other RNA
atcaaagagaacatcatctttggggtgagttacg

SEQ ID NO: 376 - RNA, 34 nt, synthetic construct
  source 1..34: mol_type = other RNA
attaaagaaaatatcatatttggtgtttcctatg

SEQ ID NO: 377 - RNA, 34 nt, synthetic construct
  source 1..34: mol_type = other RNA
attaaagaaaatatcatcttcggtgtttcgtatg

SEQ ID NO: 378 - RNA, 34 nt, synthetic construct
  source 1..34: mol_type = other RNA
attaaggaaaatatcatctttggtgtttcctatg

SEQ ID NO: 379 - RNA, 34 nt, synthetic construct
  source 1..34: mol_type = other RNA
attaaggagaatattatctttggagtgtcctatg

SEQ ID NO: 380 - RNA, 34 nt, synthetic construct
  source 1..34: mol_type = other RNA
attaaagaaaatattatatttggtgtttcctatg

SEQ ID NO: 381 - RNA, 34 nt, synthetic construct
  source 1..34: mol_type = other RNA
ataaaggagaacattatcttcggagtcagttacg

SEQ ID NO: 382 - RNA, 34 nt, synthetic construct
  source 1..34: mol_type = other RNA
attaaagaaaacatcatctttggtgtatcctatg

SEQ ID NO: 383 - RNA, 34 nt, synthetic construct
  source 1..34: mol_type = other RNA
attaaagaaaatatcatctttggggtatcctatg

SEQ ID NO: 384 - RNA, 34 nt, synthetic construct
  source 1..34: mol_type = other RNA
attaaagaaaacatcatctttggcgtttcctatg

SEQ ID NO: 385 - RNA, 34 nt, synthetic construct
  source 1..34: mol_type = other RNA
attaaagaaaatatcatctttggcgtgtcctatg

SEQ ID NO: 386 - RNA, 34 nt, synthetic construct
  source 1..34: mol_type = other RNA
atcaaagaaaatatcatctttggtgtttcctatg

SEQ ID NO: 387 - RNA, 34 nt, synthetic construct
  source 1..34: mol_type = other RNA
attaaagagaacattatcttcggtgtttcctatg

SEQ ID NO: 388 - RNA, 34 nt, synthetic construct
  source 1..34: mol_type = other RNA
atcaaagagaacataatctttggggtatcctacg

SEQ ID NO: 389 - RNA, 34 nt, synthetic construct
  source 1..34: mol_type = other RNA
attaaagaaaatattatctttggggtttcctatg

SEQ ID NO: 390 - RNA, 34 nt, synthetic construct
  source 1..34: mol_type = other RNA
attaaagaaaatattatctttggtgtttcttatg

SEQ ID NO: 391 - RNA, 34 nt, synthetic construct
  source 1..34: mol_type = other RNA
attaaagagaatatcatctttggggtttcctatg

SEQ ID NO: 392 - RNA, 34 nt, synthetic construct
  source 1..34: mol_type = other RNA
attaaagaaaatatcatctttggtgtatcgtatg

SEQ ID NO: 393 - RNA, 34 nt, synthetic construct
  source 1..34: mol_type = other RNA
attaaagagaatatcatatttggtgtttcctatg

SEQ ID NO: 394 - RNA, 34 nt, synthetic construct
  source 1..34: mol_type = other RNA
attaaagaaaatatcatctttggggtttcgtatg

SEQ ID NO: 395 - RNA, 34 nt, synthetic construct
  source 1..34: mol_type = other RNA
attaaagaaaatatcatatttggtgtttcgtatg

SEQ ID NO: 396 - RNA, 34 nt, synthetic construct
  source 1..34: mol_type = other RNA
attaaagaaaatatcatctttggtgtctcatatg

SEQ ID NO: 397 - RNA, 34 nt, synthetic construct
  source 1..34: mol_type = other RNA
attaaagagaatatcatctttggtgtatcctatg

SEQ ID NO: 398 - RNA, 34 nt, synthetic construct
  source 1..34: mol_type = other RNA
attaaagaaaatataatctttggagtttcctatg

SEQ ID NO: 399 - RNA, 34 nt, synthetic construct
  source 1..34: mol_type = other RNA
attaaagagaatataatctttggtgtttcctatg

SEQ ID NO: 400 - RNA, 34 nt, synthetic construct
  source 1..34: mol_type = other RNA
attaaagagaatatcatctttggcgtttcctatg

SEQ ID NO: 401 - RNA, 34 nt, synthetic construct
  source 1..34: mol_type = other RNA
attaaagaaaatattatcttcggggtttcctatg

SEQ ID NO: 402 - RNA, 34 nt, synthetic construct
  source 1..34: mol_type = other RNA
attaaagaaaatatcatctttggtgtgtcctatg

SEQ ID NO: 403 - RNA, 34 nt, synthetic construct
  source 1..34: mol_type = other RNA
attaaagagaacatcatctttggtgtttcctatg

SEQ ID NO: 404 - RNA, 34 nt, synthetic construct
  source 1..34: mol_type = other RNA
atcaaggaaaacattatcttcggggtctcctacg

SEQ ID NO: 405 - RNA, 34 nt, synthetic construct
  source 1..34: mol_type = other RNA
attaaagaaaatatcatctttggggtgtcctatg

SEQ ID NO: 406 - RNA, 34 nt, synthetic construct
  source 1..34: mol_type = other RNA
attaaagaaaatatcatcttcggcgtttcctatg

SEQ ID NO: 407 - RNA, 34 nt, synthetic construct
  source 1..34: mol_type = other RNA
attaaagaaaatatcatcttcggtgtctcctatg

SEQ ID NO: 408 - RNA, 34 nt, synthetic construct
  source 1..34: mol_type = other RNA
attaaagaaaatatcatcttcggtgtttcctatg

SEQ ID NO: 409 - RNA, 34 nt, synthetic construct
  source 1..34: mol_type = other RNA
attaaagaaaatatcatctttggtgtctcatacg

SEQ ID NO: 410 - RNA, 34 nt, synthetic construct
  source 1..34: mol_type = other RNA
attaaagaaaatataatctttggcgtttcctatg

SEQ ID NO: 411 - RNA, 34 nt, synthetic construct
  source 1..34: mol_type = other RNA
attaaagaaaatatcatctttggtgtcagttacg

SEQ ID NO: 412 - RNA, 34 nt, synthetic construct
  source 1..34: mol_type = other RNA
attaaagaaaatatcatctttggcgtttcctatg

SEQ ID NO: 413 - RNA, 34 nt, synthetic construct
  source 1..34: mol_type = other RNA
attaaagaaaatatcatctttggagtctcctatg

SEQ ID NO: 414 - RNA, 34 nt, synthetic construct
  source 1..34: mol_type = other RNA
attaaagaaaatatcatctttggtgtctcctatg

SEQ ID NO: 415 - RNA, 34 nt, synthetic construct
  source 1..34: mol_type = other RNA
attaaagaaaatatcatctttggtgtatcgtacg

SEQ ID NO: 416 - RNA, 34 nt, synthetic construct
  source 1..34: mol_type = other RNA
attaaagaaaatatcatctttggtgtgtcatatg

SEQ ID NO: 417 - RNA, 34 nt, synthetic construct
  source 1..34: mol_type = other RNA
attaaagaaaacatcatcttcggggtgtcctacg

SEQ ID NO: 418 - RNA, 34 nt, synthetic construct
  source 1..34: mol_type = other RNA
attaaggaaaacataatcttcggtgtttcatatg

SEQ ID NO: 419 - RNA, 34 nt, synthetic construct
  source 1..34: mol_type = other RNA
attaaagaaaacatcatctttggtgtgtcctatg

SEQ ID NO: 420 - RNA, 34 nt, synthetic construct
  source 1..34: mol_type = other RNA
attaaagagaatatcatctttggagtttcctatg

SEQ ID NO: 421 - RNA, 34 nt, synthetic construct
  source 1..34: mol_type = other RNA
attaaagagaacataatcttcggtgtttcctatg

SEQ ID NO: 422 - RNA, 34 nt, synthetic construct
  source 1..34: mol_type = other RNA
attaaggaaaacattatcttcggcgtttcgtatg

SEQ ID NO: 423 - RNA, 34 nt, synthetic construct
  source 1..34: mol_type = other RNA
attaaagaaaatattatcttcggagtttcctatg

SEQ ID NO: 424 - RNA, 34 nt, synthetic construct
  source 1..34: mol_type = other RNA
attaaagaaaatatcatctttggtgtaagctatg

SEQ ID NO: 425 - RNA, 34 nt, synthetic construct
  source 1..34: mol_type = other RNA
attaaagaaaatatcatctttggtgtgtcctacg

SEQ ID NO: 426 - RNA, 34 nt, synthetic construct
  source 1..34: mol_type = other RNA
attaaagaaaacatcatcttcggagtttcctatg

SEQ ID NO: 427 - RNA, 34 nt, synthetic construct
  source 1..34: mol_type = other RNA
attaaagaaaatatcatctttggtgtcagctacg

SEQ ID NO: 428 - RNA, 34 nt, synthetic construct
  source 1..34: mol_type = other RNA
attaaagaaaatataatctttggtgtttcttatg

SEQ ID NO: 429 - RNA, 34 nt, synthetic construct
  source 1..34: mol_type = other RNA
attaaagaaaatatcatctttggcgtatcctatg

SEQ ID NO: 430 - RNA, 34 nt, synthetic construct
  source 1..34: mol_type = other RNA
attaaagaaaatatcatctttggtgtttcttacg

SEQ ID NO: 431 - RNA, 34 nt, synthetic construct
  source 1..34: mol_type = other RNA
attaaagaaaatataatctttggtgtctcctatg

SEQ ID NO: 432 - RNA, 34 nt, synthetic construct
  source 1..34: mol_type = other RNA
attaaagaaaacataatcttcggggtttcctatg

SEQ ID NO: 433 - RNA, 34 nt, synthetic construct
  source 1..34: mol_type = other RNA
ataaaagaaaatatcatatttggtgtttcctatg

SEQ ID NO: 434 - RNA, 34 nt, synthetic construct
  source 1..34: mol_type = other RNA
attaaagaaaatataatctttggggtttcctatg

SEQ ID NO: 435 - RNA, 34 nt, synthetic construct
  source 1..34: mol_type = other RNA
attaaagaaaatatcatctttggtgtctcgtatg

SEQ ID NO: 436 - RNA, 34 nt, synthetic construct
  source 1..34: mol_type = other RNA
atcaaagaaaatattatctttggggtcagctatg

SEQ ID NO: 437 - RNA, 34 nt, synthetic construct
  source 1..34: mol_type = other RNA
attaaagaaaatatcatctttggtgtaagttacg

SEQ ID NO: 438 - RNA, 34 nt, synthetic construct
  source 1..34: mol_type = other RNA
attaaagaaaatatcatctttggtgtatcctacg

SEQ ID NO: 439 - RNA, 34 nt, synthetic construct
  source 1..34: mol_type = other RNA
attaaagaaaatatcatctttggtgtgtcgtatg

SEQ ID NO: 440 - RNA, 34 nt, synthetic construct
  source 1..34: mol_type = other RNA
attaaagaaaacatcatctttggggtttcctatg

SEQ ID NO: 441 - RNA, 34 nt, synthetic construct
  source 1..34: mol_type = other RNA
attaaggagaacattatctttggggtaagttatg

SEQ ID NO: 442 - RNA, 34 nt, synthetic construct
  source 1..34: mol_type = other RNA
attaaagaaaacataatcttcggcgtttcctatg

SEQ ID NO: 443 - RNA, 34 nt, synthetic construct
  source 1..34: mol_type = other RNA
ataaaggagaacattatcttcggggtcagttacg

SEQ ID NO: 444 - RNA, 34 nt, synthetic construct
  source 1..34: mol_type = other RNA
attaaagaaaatatcatctttggggtttcctatg

SEQ ID NO: 445 - RNA, 34 nt, synthetic construct
  source 1..34: mol_type = other RNA
attaaagaaaatattatctttggtgtctcctatg

SEQ ID NO: 446 - RNA, 34 nt, synthetic construct
  source 1..34: mol_type = other RNA
atcaaggaaaatataatctttggtgtctcgtacg

SEQ ID NO: 447 - RNA, 34 nt, synthetic construct
  source 1..34: mol_type = other RNA
attaaagaaaatataatctttggggtgtcttacg

SEQ ID NO: 448 - RNA, 34 nt, synthetic construct
  source 1..34: mol_type = other RNA
attaaagagaacataatctttggtgtttcctatg

SEQ ID NO: 449 - RNA, 34 nt, synthetic construct
  source 1..34: mol_type = other RNA
attaaagaaaatataatcttcggagtttcctatg

SEQ ID NO: 450 - RNA, 34 nt, synthetic construct
  source 1..34: mol_type = other RNA
attaaagaaaatatcatctttggcgtttcgtatg

SEQ ID NO: 451 - RNA, 34 nt, synthetic construct
  source 1..34: mol_type = other RNA
attaaagaaaacataatctttggagtttcctatg

SEQ ID NO: 452 - RNA, 34 nt, synthetic construct
  source 1..34: mol_type = other RNA
attaaagaaaatatcatctttggtgtgtcttatg

SEQ ID NO: 453 - RNA, 34 nt, synthetic construct
  source 1..34: mol_type = other RNA
attaaagaaaatatcatctttggtgttagctacg

SEQ ID NO: 454 - RNA, 34 nt, synthetic construct
  source 1..34: mol_type = other RNA
attaaagaaaatatcatctttggtgtgtcttacg

SEQ ID NO: 455 - RNA, 34 nt, synthetic construct
  source 1..34: mol_type = other RNA
attaaagaaaatatcatatttggtgtgtcctatg

SEQ ID NO: 456 - RNA, 34 nt, synthetic construct
  source 1..34: mol_type = other RNA
attaaagaaaacataatcttcggtgtttcctatg

SEQ ID NO: 457 - RNA, 34 nt, synthetic construct
  source 1..34: mol_type = other RNA
ataaaggaaaacattatctttggagtctcctatg

SEQ ID NO: 458 - RNA, 34 nt, synthetic construct
  source 1..34: mol_type = other RNA
attaaggaaaatatcatatttggtgtttcctatg

SEQ ID NO: 459 - RNA, 34 nt, synthetic construct
  source 1..34: mol_type = other RNA
attaaagaaaacattatctttggtgtttcctatg

SEQ ID NO: 460 - RNA, 34 nt, synthetic construct
  source 1..34: mol_type = other RNA
attaaagaaaatattatctttggtgtgtcctatg

SEQ ID NO: 461 - RNA, 34 nt, synthetic construct
  source 1..34: mol_type = other RNA
attaaagagaatatcatctttggtgtttcctatg

SEQ ID NO: 462 - RNA, 34 nt, synthetic construct
  source 1..34: mol_type = other RNA
attaaagaaaacatcatctttggtgtttcttatg

SEQ ID NO: 463 - RNA, 34 nt, synthetic construct
  source 1..34: mol_type = other RNA
ataaaagaaaatataatctttggtgtctcgtacg

SEQ ID NO: 464 - RNA, 34 nt, synthetic construct
  source 1..34: mol_type = other RNA
attaaagaaaatatcatctttggagtatcctatg

SEQ ID NO: 465 - RNA, 34 nt, synthetic construct
  source 1..34: mol_type = other RNA
attaaagaaaatatcatctttggagtttcctacg

SEQ ID NO: 466 - RNA, 34 nt, synthetic construct
  source 1..34: mol_type = other RNA
attaaagaaaatatcatatttggtgtctcctatg

SEQ ID NO: 467 - RNA, 34 nt, synthetic construct
  source 1..34: mol_type = other RNA
atcaaggagaatatcatctttggtgtttcctatg

SEQ ID NO: 468 - RNA, 34 nt, synthetic construct
  source 1..34: mol_type = other RNA
attaaagaaaacattatcttcggtgtttcctatg

SEQ ID NO: 469 - RNA, 34 nt, synthetic construct
  source 1..34: mol_type = other RNA
attaaagaaaacattatcttcggcgtttcctatg

SEQ ID NO: 470 - RNA, 34 nt, synthetic construct
  source 1..34: mol_type = other RNA
ataaaggagaatatcatctttggggtcagctacg

SEQ ID NO: 471 - RNA, 34 nt, synthetic construct
  source 1..34: mol_type = other RNA
attaaagaaaatatcatctttggagtttcgtatg

SEQ ID NO: 472 - RNA, 34 nt, synthetic construct
  source 1..34: mol_type = other RNA
attaaagaaaatatcatatttggtgtatcctatg

SEQ ID NO: 473 - RNA, 34 nt, synthetic construct
  source 1..34: mol_type = other RNA
attaaagaaaatatcatctttggtgtatcctatg

SEQ ID NO: 474 - RNA, 34 nt, synthetic construct
  source 1..34: mol_type = other RNA
atcaaagaaaatattatctttggggtctcatacg

SEQ ID NO: 475 - RNA, 34 nt, synthetic construct
  source 1..34: mol_type = other RNA
attaaagaaaacatcatctttggtgtttcctatg

SEQ ID NO: 476 - RNA, 34 nt, synthetic construct
  source 1..34: mol_type = other RNA
attaaagaaaatataatctttggtgtttcgtatg

SEQ ID NO: 477 - RNA, 34 nt, synthetic construct
  source 1..34: mol_type = other RNA
attaaagaaaatataatcttcggcgtttcctatg

SEQ ID NO: 478 - RNA, 34 nt, synthetic construct
  source 1..34: mol_type = other RNA
attaaagaaaatattatctttggtgtttcctacg

SEQ ID NO: 479 - RNA, 34 nt, synthetic construct
  source 1..34: mol_type = other RNA
attaaagagaatatcatcttcggtgtttcctatg

SEQ ID NO: 480 - RNA, 34 nt, synthetic construct
  source 1..34: mol_type = other RNA
attaaagaaaatatcatcttcggagtttcctatg

SEQ ID NO: 481 - RNA, 34 nt, synthetic construct
  source 1..34: mol_type = other RNA
attaaagaaaatatcatctttggtgtatcttatg

SEQ ID NO: 482 - RNA, 34 nt, synthetic construct
  source 1..34: mol_type = other RNA
attaaagaaaatatcatatttggtgtttcatatg

SEQ ID NO: 483 - RNA, 34 nt, synthetic construct
  source 1..34: mol_type = other RNA
attaaagaaaatatcatctttggtgtctcttatg

SEQ ID NO: 484 - RNA, 34 nt, synthetic construct
  source 1..34: mol_type = other RNA
attaaagaaaatatcatcttcggggtttcctatg

SEQ ID NO: 485 - RNA, 34 nt, synthetic construct
  source 1..34: mol_type = other RNA
attaaagaaaacatcatctttggtgtctcctatg

SEQ ID NO: 486 - RNA, 34 nt, synthetic construct
  source 1..34: mol_type = other RNA
attaaagaaaatatcatattcggtgtttcctatg

SEQ ID NO: 487 - RNA, 34 nt, synthetic construct
  source 1..34: mol_type = other RNA
attaaagaaaatatcatctttggcgtttcctacg

SEQ ID NO: 488 - RNA, 34 nt, synthetic construct
  source 1..34: mol_type = other RNA
attaaagaaaatataatctttggtgtttcctacg

SEQ ID NO: 489 - RNA, 34 nt, synthetic construct
  source 1..34: mol_type = other RNA
attaaagaaaatatcatctttggagtttcttatg

SEQ ID NO: 490 - RNA, 34 nt, synthetic construct
  source 1..34: mol_type = other RNA
attaaagaaaatatcatctttggtgtctcctacg

SEQ ID NO: 491 - RNA, 34 nt, synthetic construct
  source 1..34: mol_type = other RNA
atcaaggagaacattatcttcggcgtgtcgtatg

SEQ ID NO: 492 - RNA, 34 nt, synthetic construct
  source 1..34: mol_type = other RNA
attaaagaaaatataatctttggtgtatcctatg

SEQ ID NO: 493 - RNA, 34 nt, synthetic construct
  source 1..34: mol_type = other RNA
attaaagaaaacatcatcttcggtgtttcctatg

SEQ ID NO: 494 - RNA, 34 nt, synthetic construct
  source 1..34: mol_type = other RNA
atcaaggagaacataatcttcggcgtcagttacg

SEQ ID NO: 495 - RNA, 34 nt, synthetic construct
  source 1..34: mol_type = other RNA
attaaagagaacattatcttcggcgtgagctatg

SEQ ID NO: 496 - RNA, 34 nt, synthetic construct
  source 1..34: mol_type = other RNA
attaaagaaaatataatatttggtgtttcctatg

SEQ ID NO: 497 - RNA, 34 nt, synthetic construct
  source 1..34: mol_type = other RNA
attaaagaaaatataatctttggtgtttcatatg

SEQ ID NO: 498 - RNA, 34 nt, synthetic construct
  source 1..34: mol_type = other RNA
attaaagaaaatatcatcttcggtgtttcctacg

SEQ ID NO: 499 - RNA, 34 nt, synthetic construct
  source 1..34: mol_type = other RNA
attaaagagaatatcatctttggtgtgtcctatg

SEQ ID NO: 500 - RNA, 34 nt, synthetic construct
  source 1..34: mol_type = other RNA
attaaagaaaacattatctttggcgtttcctatg

SEQ ID NO: 501 - RNA, 34 nt, synthetic construct
  source 1..34: mol_type = other RNA
atcaaagaaaacataatctttggcgtgtcatatg

SEQ ID NO: 502 - RNA, 34 nt, synthetic construct
  source 1..34: mol_type = other RNA
attaaagaaaatatcatctttggcgtttcatatg

SEQ ID NO: 503 - RNA, 34 nt, synthetic construct
  source 1..34: mol_type = other RNA
attaaagaaaatattatctttggtgtttcgtatg

SEQ ID NO: 504 - RNA, 34 nt, synthetic construct
  source 1..34: mol_type = other RNA
ataaaagagaatataatctttggagtcagttacg

SEQ ID NO: 505 - RNA, 34 nt, synthetic construct
  source 1..34: mol_type = other RNA
attaaagaaaatatcatctttggggtttcatatg

SEQ ID NO: 506 - RNA, 34 nt, synthetic construct
  source 1..34: mol_type = other RNA
attaaagaaaatattatctttggtgtatcctatg

SEQ ID NO: 507 - RNA, 34 nt, synthetic construct
  source 1..34: mol_type = other RNA
ataaaagaaaacattatcttcggtgtatcctatg

SEQ ID NO: 508 - RNA, 34 nt, synthetic construct
  source 1..34: mol_type = other RNA
attaaggagaatataatcttcggtgtgtcgtatg

SEQ ID NO: 509 - RNA, 34 nt, synthetic construct
  source 1..34: mol_type = other RNA
attaaagagaatataatcttcggtgtttcctatg

SEQ ID NO: 510 - RNA, 34 nt, synthetic construct
  source 1..34: mol_type = other RNA
attaaagaaaatataatctttggtgtgtcctatg

SEQ ID NO: 511 - RNA, 34 nt, synthetic construct
  source 1..34: mol_type = other RNA
attaaagaaaatatcatctttggagtgtcctatg

SEQ ID NO: 512 - RNA, 34 nt, synthetic construct
  source 1..34: mol_type = other RNA
attaaagaaaatatcatctttggggtttcttatg

SEQ ID NO: 513 - RNA, 34 nt, synthetic construct
  source 1..34: mol_type = other RNA
attaaagagaatatcatctttggtgtttcttatg

SEQ ID NO: 514 - RNA, 34 nt, synthetic construct
  source 1..34: mol_type = other RNA
attaaagagaatattatctttggtgtttcctatg

SEQ ID NO: 515 - RNA, 34 nt, synthetic construct
  source 1..34: mol_type = other RNA
attaaagaaaatattatctttggagtttcctatg

SEQ ID NO: 516 - RNA, 34 nt, synthetic construct
  source 1..34: mol_type = other RNA
attaaagaaaacatcatctttggtgtttcatatg

SEQ ID NO: 517 - RNA, 34 nt, synthetic construct
  source 1..34: mol_type = other RNA
attaaagaaaacatcatctttggagtttcctatg

SEQ ID NO: 518 - RNA, 34 nt, synthetic construct
  source 1..34: mol_type = other RNA
attaaagaaaatatcatctttggcgtttcttatg

SEQ ID NO: 519 - RNA, 34 nt, synthetic construct
  source 1..34: mol_type = other RNA
attaaagaaaacatcatctttggtgtttcgtatg

SEQ ID NO: 520 - RNA, 34 nt, synthetic construct
  source 1..34: mol_type = other RNA
attaaagaaaatatcatctttggtgtatcatatg

SEQ ID NO: 521 - RNA, 34 nt, synthetic construct
  source 1..34: mol_type = other RNA
attaaagaaaatatcatctttggagtttcctatg

SEQ ID NO: 522 - RNA, 34 nt, synthetic construct
  source 1..34: mol_type = other RNA
attaaagaaaacataatctttggtgtttcctatg

SEQ ID NO: 523 - RNA, 34 nt, synthetic construct
  source 1..34: mol_type = other RNA
attaaagaaaatatcatatttggagtttcctatg

SEQ ID NO: 524 - RNA, 34 nt, synthetic construct
  source 1..34: mol_type = other RNA
attaaagaaaacatcatatttggtgtttcctatg

SEQ ID NO: 525 - RNA, 34 nt, synthetic construct
  source 1..34: mol_type = other RNA
attaaagaaaatatcatctttggggtctcctatg

SEQ ID NO: 526 - RNA, 34 nt, synthetic construct
  source 1..34: mol_type = other RNA
attaaagaaaatatcatcttcggtgtatcctatg

SEQ ID NO: 527 - RNA, 34 nt, synthetic construct
  source 1..34: mol_type = other RNA
attaaagaaaatataatctttggtgtttcctatg

SEQ ID NO: 528 - RNA, 34 nt, synthetic construct
  source 1..34: mol_type = other RNA
attaaagagaatatcatctttggtgtttcgtatg

SEQ ID NO: 529 - RNA, 34 nt, synthetic construct
  source 1..34: mol_type = other RNA
attaaggagaacatcatcttcggggtttcctatg

SEQ ID NO: 530 - RNA, 34 nt, synthetic construct
  source 1..34: mol_type = other RNA
attaaagaaaatattatctttggcgtttcctatg

SEQ ID NO: 531 - RNA, 34 nt, synthetic construct
  source 1..34: mol_type = other RNA
attaaagaaaatatcatatttggggtttcctatg

SEQ ID NO: 532 - RNA, 34 nt, synthetic construct
  source 1..34: mol_type = other RNA
attaaagaaaatatcatctttggtgtttcatacg

SEQ ID NO: 533 - RNA, 34 nt, synthetic construct
  source 1..34: mol_type = other RNA
attaaagaaaatatcatctttggtgtttcgtacg

SEQ ID NO: 534 - RNA, 34 nt, synthetic construct
  source 1..34: mol_type = other RNA
attaaagagaatatcatctttggtgtttcatatg

SEQ ID NO: 535 - RNA, 34 nt, synthetic construct
  source 1..34: mol_type = other RNA
attaaagaaaatatcatatttggcgtttcctatg

SEQ ID NO: 536 - RNA, 34 nt, synthetic construct
  source 1..34: mol_type = other RNA
ataaaagaaaatatcatctttggtgtttcctatg

SEQ ID NO: 537 - RNA, 34 nt, synthetic construct
  source 1..34: mol_type = other RNA
ataaaagaaaacattatctttggagtatcgtatg

SEQ ID NO: 538 - RNA, 34 nt, synthetic construct
  source 1..34: mol_type = other RNA
attaaagaaaatatcatatttggtgtttcttatg

SEQ ID NO: 539 - RNA, 34 nt, synthetic construct
  source 1..34: mol_type = other RNA
atcaaagaaaatatcatatttggtgtttcctatg

SEQ ID NO: 540 - RNA, 34 nt, synthetic construct
  source 1..34: mol_type = other RNA
attaaagaaaatattatctttggtgtttcctatg

SEQ ID NO: 541 - RNA, 35 nt, synthetic construct
  source 1..35: mol_type = other RNA
caccaaagatgatattttctttaatggtgccaggc

SEQ ID NO: 542 - RNA, 35 nt, synthetic construct
  source 1..35: mol_type = other RNA
cattaaagaaaatatcatctttggtgtttcctatg

SEQ ID NO: 543 - RNA, 35 nt, synthetic construct
  source 1..35: mol_type = other RNA
tatgcctggcaccattaaagaaaatatcatctttg

SEQ ID NO: 544 - RNA, 36 nt, synthetic construct
  source 1..36: mol_type = other RNA
acaccaaagatgatattttctttaatggtgccaggc

SEQ ID NO: 545 - RNA, 36 nt, synthetic construct
  source 1..36: mol_type = other RNA
ccattaaagaaaatatcatctttggtgtttcctatg

SEQ ID NO: 546 - RNA, 37 nt, synthetic construct
  source 1..37: mol_type = other RNA
aacaccaaagatgatattttctttaatggtgccaggc

SEQ ID NO: 547 - RNA, 37 nt, synthetic construct
  source 1..37: mol_type = other RNA
accattaaagaaaatatcatctttggtgtttcctatg

SEQ ID NO: 548 - RNA, 37 nt, synthetic construct
  source 1..37: mol_type = other RNA
aacaccaaagatgatattttctttaatggtaccaggc

SEQ ID NO: 549 - RNA, 37 nt, synthetic construct
  source 1..37: mol_type = other RNA
aacaccaaagataatattttctttaatggtgccaggc

SEQ ID NO: 550 - RNA, 37 nt, synthetic construct
  source 1..37: mol_type = other RNA
aacaccaaagatgatattttctttaatcgtgccaggc

SEQ ID NO: 551 - RNA, 37 nt, synthetic construct
  source 1..37: mol_type = other RNA
aacaccaaagatgatgttttctttaatggtgccaggc

SEQ ID NO: 552 - RNA, 37 nt, synthetic construct
  source 1..37: mol_type = other RNA
aacaccaaagatgatattttcttttatggtgccaggc

SEQ ID NO: 553 - RNA, 37 nt, synthetic construct
  source 1..37: mol_type = other RNA
aacaccaaagatgatattttctttaattgtgccaggc

SEQ ID NO: 554 - RNA, 37 nt, synthetic construct
  source 1..37: mol_type = other RNA
cacaccaaagatgatattttctttaatggtgccaggc

SEQ ID NO: 555 - RNA, 37 nt, synthetic construct
  source 1..37: mol_type = other RNA
aactccaaagatgatattttctttaatggtgccaggc

SEQ ID NO: 556 - RNA, 37 nt, synthetic construct
  source 1..37: mol_type = other RNA
gacaccaaagatgatattttctttaatggtgccaggc

SEQ ID NO: 557 - RNA, 37 nt, synthetic construct
  source 1..37: mol_type = other RNA
aacaccaaagatgatattttctttaatggtcccaggc

SEQ ID NO: 558 - RNA, 37 nt, synthetic construct
  source 1..37: mol_type = other RNA
aacaccaaagatgatattttctttaatggtgccgggc

SEQ ID NO: 559 - RNA, 37 nt, synthetic construct
  source 1..37: mol_type = other RNA
tacaccaaagatgatattttctttaatggtgccaggc

SEQ ID NO: 560 - RNA, 37 nt, synthetic construct
  source 1..37: mol_type = other RNA
aacaccaaagatgatattttctttaatggtgcccggc

SEQ ID NO: 561 - RNA, 37 nt, synthetic construct
  source 1..37: mol_type = other RNA
aacaccgaagatgatattttctttaatggtgccaggc

SEQ ID NO: 562 - RNA, 37 nt, synthetic construct
  source 1..37: mol_type = other RNA
aacaccaaagatgatattttctttaatggtgcctggc

SEQ ID NO: 563 - RNA, 37 nt, synthetic construct
  source 1..37: mol_type = other RNA
aacgccaaagatgatattttctttaatggtgccaggc

SEQ ID NO: 564 - RNA, 37 nt, synthetic construct
  source 1..37: mol_type = other RNA
aacaccaaagatgatattttccttaatggtgccaggc

SEQ ID NO: 565 - RNA, 37 nt, synthetic construct
  source 1..37: mol_type = other RNA
aacaccaaagatgatattttctttgatggtgccaggc

SEQ ID NO: 566 - RNA, 37 nt, synthetic construct
  source 1..37: mol_type = other RNA
aaccccaaagatgatattttctttaatggtgccaggc

SEQ ID NO: 567 - RNA, 37 nt, synthetic construct
  source 1..37: mol_type = other RNA
aacaccaaagatgatattttctttaatggttccaggc

SEQ ID NO: 568 - RNA, 37 nt, synthetic construct
  source 1..37: mol_type = other RNA
aacaccaaagatgatattttctttaatagtgccaggc

SEQ ID NO: 569 - RNA, 37 nt, synthetic construct
  source 1..37: mol_type = other RNA
aacaccaaagattatattttctttaatggtgccaggc

SEQ ID NO: 570 - RNA, 37 nt, synthetic construct
  source 1..37: mol_type = other RNA
aacaccaaagatgatattctctttaatggtgccaggc

SEQ ID NO: 571 - RNA, 38 nt, synthetic construct
  source 1..38: mol_type = other RNA
aaacaccaaagatgatattttctttaatggtgccaggc

SEQ ID NO: 572 - RNA, 38 nt, synthetic construct
  source 1..38: mol_type = other RNA
caccattaaagaaaatatcatctttggtgtttcctatg

SEQ ID NO: 573 - RNA, 39 nt, synthetic construct
  source 1..39: mol_type = other RNA
gaaacaccaaagatgatattttctttaatggtgccaggc

SEQ ID NO: 574 - RNA, 39 nt, synthetic construct
  source 1..39: mol_type = other RNA
gcaccattaaagaaaatatcatctttggtgtttcctatg

SEQ ID NO: 575 - RNA, 40 nt, synthetic construct
  source 1..40: mol_type = other RNA
ggaaacaccaaagatgatattttctttaatggtgccaggc

SEQ ID NO: 576 - RNA, 40 nt, synthetic construct
  source 1..40: mol_type = other RNA
ggcaccattaaagaaaatatcatctttggtgtttcctatg

SEQ ID NO: 577 - RNA, 41 nt, synthetic construct
  source 1..41: mol_type = other RNA
cgcttctgtatctatattcatcataggaaacaccaaagatg

SEQ ID NO: 578 - RNA, 41 nt, synthetic construct
  source 1..41: mol_type = other RNA
aggaaacaccaaagatgatattttctttaatggtgccaggc

SEQ ID NO: 579 - RNA, 41 nt, synthetic construct
  source 1..41: mol_type = other RNA
tggcaccattaaagaaaatatcatctttggtgtttcctatg

SEQ ID NO: 580 - RNA, 41 nt, synthetic construct
  source 1..41: mol_type = other RNA
cgcttctgtatctatattcatcgtaggaaacaccaaagatg

SEQ ID NO: 581 - RNA, 41 nt, synthetic construct
  source 1..41: mol_type = other RNA
cgcttcggtatctatattcatcataggaaacaccaaagatg

SEQ ID NO: 582 - RNA, 41 nt, synthetic construct
  source 1..41: mol_type = other RNA
cgcttctgtatctatattcatcataggaaaccccaaagatg

SEQ ID NO: 583 - RNA, 41 nt, synthetic construct
  source 1..41: mol_type = other RNA
cgcttctgtatctatattcatcataggaaacaccaaagatt

SEQ ID NO: 584 - RNA, 41 nt, synthetic construct
  source 1..41: mol_type = other RNA
cgcttctgtatctatattcatcataggaaacaccaaagata

SEQ ID NO: 585 - RNA, 41 nt, synthetic construct
  source 1..41: mol_type = other RNA
cgcttctgtatctatattcatcataagaaacaccaaagatg

SEQ ID NO: 586 - RNA, 41 nt, synthetic construct
  source 1..41: mol_type = other RNA
cgcttctgtacctatattcatcataggaaacaccaaagatg

SEQ ID NO: 587 - RNA, 41 nt, synthetic construct
  source 1..41: mol_type = other RNA
cgcttctgtatctatattcatcataggaaacgccaaagatg

SEQ ID NO: 588 - RNA, 41 nt, synthetic construct
  source 1..41: mol_type = other RNA
cgcttctgtatctatattcatcataggacacaccaaagatg

SEQ ID NO: 589 - RNA, 41 nt, synthetic construct
  source 1..41: mol_type = other RNA
cgcttctatatctatattcatcataggaaacaccaaagatg

SEQ ID NO: 590 - RNA, 41 nt, synthetic construct
  source 1..41: mol_type = other RNA
cacttctgtatctatattcatcataggaaacaccaaagatg

SEQ ID NO: 591 - RNA, 41 nt, synthetic construct
  source 1..41: mol_type = other RNA
cgcttctgtatctatattcatcatatgaaacaccaaagatg

SEQ ID NO: 592 - RNA, 41 nt, synthetic construct
  source 1..41: mol_type = other RNA
cgcttctgtatctatactcatcataggaaacaccaaagatg

SEQ ID NO: 593 - RNA, 41 nt, synthetic construct
  source 1..41: mol_type = other RNA
cgcttctgtatctatattcatcataggaaactccaaagatg

SEQ ID NO: 594 - RNA, 41 nt, synthetic construct
  source 1..41: mol_type = other RNA
cgcttctgtatctatattcatcataggatacaccaaagatg

SEQ ID NO: 595 - RNA, 41 nt, synthetic construct
  source 1..41: mol_type = other RNA
cgcttctgtatctatattcatcatacgaaacaccaaagatg

SEQ ID NO: 596 - RNA, 41 nt, synthetic construct
  source 1..41: mol_type = other RNA
cgcttctgtatctgtattcatcataggaaacaccaaagatg

SEQ ID NO: 597 - RNA, 41 nt, synthetic construct
  source 1..41: mol_type = other RNA
cgctcctgtatctatattcatcataggaaacaccaaagatg

SEQ ID NO: 598 - RNA, 41 nt, synthetic construct
  source 1..41: mol_type = other RNA
cgcttctgtatctatattcgtcataggaaacaccaaagatg

SEQ ID NO: 599 - RNA, 41 nt, synthetic construct
  source 1..41: mol_type = other RNA
cgcttctgtatctatattcatcataggagacaccaaagatg

SEQ ID NO: 600 - RNA, 41 nt, synthetic construct
  source 1..41: mol_type = other RNA
cgcttctgtatcgatattcatcataggaaacaccaaagatg

SEQ ID NO: 601 - RNA, 41 nt, synthetic construct
  source 1..41: mol_type = other RNA
cgcttctgtatctatattcatcataggaaacaccgaagatg

SEQ ID NO: 602 - RNA, 42 nt, synthetic construct
  source 1..42: mol_type = other RNA
taggaaacaccaaagatgatattttctttaatggtgccaggc

SEQ ID NO: 603 - RNA, 42 nt, synthetic construct
  source 1..42: mol_type = other RNA
ctggcaccattaaagaaaatatcatctttggtgtttcctatg

SEQ ID NO: 604 - RNA, 43 nt, synthetic construct
  source 1..43: mol_type = other RNA
ataggaaacaccaaagatgatattttctttaatggtgccaggc

SEQ ID NO: 605 - RNA, 43 nt, synthetic construct
  source 1..43: mol_type = other RNA
cctggcaccattaaagaaaatatcatctttggtgtttcctatg

SEQ ID NO: 606 - RNA, 44 nt, synthetic construct
  source 1..44: mol_type = other RNA
cataggaaacaccaaagatgatattttctttaatggtgccaggc

SEQ ID NO: 607 - RNA, 44 nt, synthetic construct
  source 1..44: mol_type = other RNA
gcctggcaccattaaagaaaatatcatctttggtgttagctatg

SEQ ID NO: 608 - RNA, 44 nt, synthetic construct
  source 1..44: mol_type = other RNA
gcctggcaccattaaagaaaatatcatctttggtgttagttatg

SEQ ID NO: 609 - RNA, 44 nt, synthetic construct
  source 1..44: mol_type = other RNA
gcctggcaccattaaagaaaatatcatctttggtgtttcatatg

SEQ ID NO: 610 - RNA, 44 nt, synthetic construct
  source 1..44: mol_type = other RNA
gcctggcaccattaaagaaaatatcatctttggtgtttcctatg

SEQ ID NO: 611 - RNA, 44 nt, synthetic construct
  source 1..44: mol_type = other RNA
gcctggcaccattaaagaaaatatcatctttggtgtttcgtatg

SEQ ID NO: 612 - RNA, 44 nt, synthetic construct
  source 1..44: mol_type = other RNA
gcctggcaccattaaagaaaatatcatctttggtgtttcttatg

SEQ ID NO: 613 - RNA, 44 nt, synthetic construct
  source 1..44: mol_type = other RNA
gccgggcaccattaaagaaaatatcatctttggtgtttcatatg

SEQ ID NO: 614 - RNA, 44 nt, synthetic construct
  source 1..44: mol_type = other RNA
gcctgggaccattaaagaaaatatcatctttggtgtttcgtatg

SEQ ID NO: 615 - RNA, 44 nt, synthetic construct
  source 1..44: mol_type = other RNA
catagctaacaccaaagatgatattttctttaatggtgccaggc

SEQ ID NO: 616 - RNA, 44 nt, synthetic construct
  source 1..44: mol_type = other RNA
gccagggaccattaaagaaaatatcatctttggtgtttcctatg

SEQ ID NO: 617 - RNA, 44 nt, synthetic construct
  source 1..44: mol_type = other RNA
catatgaaacaccaaagatgatattttctttaatggtgccaggc

SEQ ID NO: 618 - RNA, 44 nt, synthetic construct
  source 1..44: mol_type = other RNA
gccaggcaccattaaagaaaatatcatctttggtgtttcctatg

SEQ ID NO: 619 - RNA, 44 nt, synthetic construct
  source 1..44: mol_type = other RNA
gcctggcaccattaaagaaaatatcatctttggtgtctcgtacg

SEQ ID NO: 620 - RNA, 44 nt, synthetic construct
  source 1..44: mol_type = other RNA
gcctggcaccatcaaagaaaatatcatctttggtgtttcctacg

SEQ ID NO: 621 - RNA, 44 nt, synthetic construct
  source 1..44: mol_type = other RNA
gcctgggaccattaaagaaaatatcatctttggtgtctcttacg

SEQ ID NO: 622 - RNA, 44 nt, synthetic construct
  source 1..44: mol_type = other RNA
gccaggcaccattaaagaaaatatcatctttggtgtttcgtatg

SEQ ID NO: 623 - RNA, 44 nt, synthetic construct
  source 1..44: mol_type = other RNA
gcctgggactatcaaagaaaatatcatctttggtgtctcttacg

SEQ ID NO: 624 - RNA, 44 nt, synthetic construct
  source 1..44: mol_type = other RNA
gccaggcacgataaaggaaaacatcatcttcggtgtgtcatacg

SEQ ID NO: 625 - RNA, 44 nt, synthetic construct
  source 1..44: mol_type = other RNA
gcctgggaccatcaaagaaaatatcatctttggtgtctcttacg

SEQ ID NO: 626 - RNA, 44 nt, synthetic construct
  source 1..44: mol_type = other RNA
gcctggtacaatcaaagagaacatcatctttggtgtttcatatg

SEQ ID NO: 627 - RNA, 44 nt, synthetic construct
  source 1..44: mol_type = other RNA
gcctggcaccattaaagagaatatcatctttggtgtctcctatg

SEQ ID NO: 628 - RNA, 44 nt, synthetic construct
  source 1..44: mol_type = other RNA
gcctggcaccatcaaagaaaatatcatctttggtgtctcatacg

SEQ ID NO: 629 - RNA, 44 nt, synthetic construct
  source 1..44: mol_type = other RNA
gcctggcaccattaaagaaaatatcatctttggtgtttcatacg

SEQ ID NO: 630 - RNA, 44 nt, synthetic construct
  source 1..44: mol_type = other RNA
gcctggcaccatcaaagaaaatatcatctttggtgtctcgtatg

SEQ ID NO: 631 - RNA, 44 nt, synthetic construct
  source 1..44: mol_type = other RNA
gcctggtacaattaaagaaaatatcatctttggcgtttcctatg

SEQ ID NO: 632 - RNA, 44 nt, synthetic construct
  source 1..44: mol_type = other RNA
gcctgggaccatcaaagaaaatataatctttggtgtctcatacg

SEQ ID NO: 633 - RNA, 44 nt, synthetic construct
  source 1..44: mol_type = other RNA
ggctggcaccattaaagaaaatatcatctttggtgtttcctcat

SEQ ID NO: 634 - RNA, 44 nt, synthetic construct
  source 1..44: mol_type = other RNA
cataactaacaccaaagatgatattttctttaatggtgccaggc

SEQ ID NO: 635 - RNA, 44 nt, synthetic construct
  source 1..44: mol_type = other RNA
gccggggacgattaaagagaatataatctttggagtttcttacg

SEQ ID NO: 636 - RNA, 44 nt, synthetic construct
  source 1..44: mol_type = other RNA
gcctgggactatcaaagaaaatatcatctttggtgtctcatacg

SEQ ID NO: 637 - RNA, 44 nt, synthetic construct
  source 1..44: mol_type = other RNA
catagctaacaccaaagatgatattctctttaatggtgccaggc

SEQ ID NO: 638 - RNA, 44 nt, synthetic construct
  source 1..44: mol_type = other RNA
cataggaaacaccaaagatgatattttctttaatggtgccgggc

SEQ ID NO: 639 - RNA, 44 nt, synthetic construct
  source 1..44: mol_type = other RNA
gccgggcaccatcaaagagaacatcatctttggtgttagctatg

SEQ ID NO: 640 - RNA, 44 nt, synthetic construct
  source 1..44: mol_type = other RNA
gcctggtactattaaagaaaatatcatctttggggtttcctatg

SEQ ID NO: 641 - RNA, 44 nt, synthetic construct
  source 1..44: mol_type = other RNA
gcctgggaccattaaagaaaatatcatctttggtgtctcatatg

SEQ ID NO: 642 - RNA, 44 nt, synthetic construct
  source 1..44: mol_type = other RNA
gcctggcaccattaaagaaaatatcatctttggtgtctcttatg

SEQ ID NO: 643 - RNA, 44 nt, synthetic construct
  source 1..44: mol_type = other RNA
gccgggcaccattaaagaaaatatcatctttggtgtttcttatg

SEQ ID NO: 644 - RNA, 44 nt, synthetic construct
  source 1..44: mol_type = other RNA
gcccgggacgatcaaagagaacatcatctttggcgtcagttacg

SEQ ID NO: 645 - RNA, 44 nt, synthetic construct
  source 1..44: mol_type = other RNA
gccaggcaccatcaaagaaaatatcatctttggtgtttcctatg

SEQ ID NO: 646 - RNA, 44 nt, synthetic construct
  source 1..44: mol_type = other RNA
gcctgggaccattaaagaaaatatcatctttggtgtctcctatg

SEQ ID NO: 647 - RNA, 44 nt, synthetic construct
  source 1..44: mol_type = other RNA
gcccggtacaatcaaagaaaatatcatctttggggtgagttacg

SEQ ID NO: 648 - RNA, 44 nt, synthetic construct
  source 1..44: mol_type = other RNA
gcctgggaccattaaagaaaatatcatctttggtgtttcatatg

SEQ ID NO: 649 - RNA, 44 nt, synthetic construct
  source 1..44: mol_type = other RNA
gcctggcaccattaaagagaatatcatctttggtgtttcctatg

SEQ ID NO: 650 - RNA, 44 nt, synthetic construct
  source 1..44: mol_type = other RNA
gccggggaccatcaaagagaatatcatctttggtgtctcatacg

SEQ ID NO: 651 - RNA, 44 nt, synthetic construct
  source 1..44: mol_type = other RNA
cataggaaacaccaaagatgatattttctttaatggtgcccggc

SEQ ID NO: 652 - RNA, 44 nt, synthetic construct
  source 1..44: mol_type = other RNA
gcctgggaccatcaaagaaaatataatctttggtgtctcgtacg

SEQ ID NO: 653 - RNA, 44 nt, synthetic construct
  source 1..44: mol_type = other RNA
gccgggaaccatcaaagagaatatcatctttggtgtctcatacg

SEQ ID NO: 654 - RNA, 44 nt, synthetic construct
  source 1..44: mol_type = other RNA
gcctggaaccatcaaagaaaatatcatctttggtgtttcctatg

SEQ ID NO: 655 - RNA, 44 nt, synthetic construct
  source 1..44: mol_type = other RNA
cataggaaacaccaaagatgatattttctttaatggtcccaggc

SEQ ID NO: 656 - RNA, 44 nt, synthetic construct
  source 1..44: mol_type = other RNA
gcctggcaccattaaagaaaatatcatctttggtgtttcctacg

SEQ ID NO: 657 - RNA, 44 nt, synthetic construct
  source 1..44: mol_type = other RNA
gcctggaaccattaaagaaaatatcatctttggtgtctcctatg

SEQ ID NO: 658 - RNA, 44 nt, synthetic construct
  source 1..44: mol_type = other RNA
gcctggcaccattaaagaaaatatcatctttggtgtctcctacg

SEQ ID NO: 659 - RNA, 44 nt, synthetic construct
  source 1..44: mol_type = other RNA
gcctggcaccatcaaagagaatatcatctttggtgtttcctatg

SEQ ID NO: 660 - RNA, 44 nt, synthetic construct
  source 1..44: mol_type = other RNA
gcctgggaccatcaaagaaaatatcatctttggtgtctcctatg

SEQ ID NO: 661 - RNA, 44 nt, synthetic construct
  source 1..44: mol_type = other RNA
gccgggaaccatcaaagagaatatcatctttggtgtctcttacg

SEQ ID NO: 662 - RNA, 44 nt, synthetic construct
  source 1..44: mol_type = other RNA
gcctggcaccatcaaagaaaatatcatctttggtgtctcatatg

SEQ ID NO: 663 - RNA, 44 nt, synthetic construct
  source 1..44: mol_type = other RNA
gccaggcactattaaagagaacatcatctttggagtgtcgtacg

SEQ ID NO: 664 - RNA, 44 nt, synthetic construct
  source 1..44: mol_type = other RNA
cataggacacaccaaagatgatattttctttaatggtgccaggc

SEQ ID NO: 665 - RNA, 44 nt, synthetic construct
  source 1..44: mol_type = other RNA
gcctgggaccatcaaagaaaatatcatctttggtgtttcatacg

SEQ ID NO: 666 - RNA, 44 nt, synthetic construct
  source 1..44: mol_type = other RNA
cataggaaacaccaaagataatattttctttaatggtgccaggc

SEQ ID NO: 667 - RNA, 44 nt, synthetic construct
  source 1..44: mol_type = other RNA
cgtaggaaacaccaaagatgatattttctttaatggtgccaggc

SEQ ID NO: 668 - RNA, 44 nt, synthetic construct
  source 1..44: mol_type = other RNA
gcctgggaccatcaaagaaaatatcatctttggtgtctcatatg

SEQ ID NO: 669 - RNA, 44 nt, synthetic construct
  source 1..44: mol_type = other RNA
gcctggaaccattaaagaaaatatcatctttggtgtttcttatg

SEQ ID NO: 670 - RNA, 44 nt, synthetic construct
  source 1..44: mol_type = other RNA
cataggaaacgccaaagatgatattttctttaatggtgccaggc

SEQ ID NO: 671 - RNA, 44 nt, synthetic construct
  source 1..44: mol_type = other RNA
cataggatacaccaaagatgatattttctttaatggtgccaggc

SEQ ID NO: 672 - RNA, 44 nt, synthetic construct
  source 1..44: mol_type = other RNA
gcctgggaccatcaaagaaaatatcatctttggtgtctcgtatg

SEQ ID NO: 673 - RNA, 44 nt, synthetic construct
  source 1..44: mol_type = other RNA
cataggaaacaccaaagattatattttctttaatggtgccaggc

SEQ ID NO: 674 - RNA, 44 nt, synthetic construct
  source 1..44: mol_type = other RNA
gcctggaaccattaaagaaaatatcatctttggtgtttcctatg

SEQ ID NO: 675 - RNA, 44 nt, synthetic construct
  source 1..44: mol_type = other RNA
gcctggcaccatcaaagagaacatcatctttggtgtttcatatg

SEQ ID NO: 676 - RNA, 44 nt, synthetic construct
  source 1..44: mol_type = other RNA
cataggaaacaccaaagatgatattttctttaatggttccaggc

SEQ ID NO: 677 - RNA, 44 nt, synthetic construct
  source 1..44: mol_type = other RNA
catacgaaacaccaaagatgatgttctctttgatggtgccaggc

SEQ ID NO: 678 - RNA, 44 nt, synthetic construct
  source 1..44: mol_type = other RNA
gcccgggacgatcaaggagaacatcatcttcggcgtctcctacg

SEQ ID NO: 679 - RNA, 44 nt, synthetic construct
  source 1..44: mol_type = other RNA
gcctggcaccatcaaagagaacatcatctttggtgtttcgtatg

SEQ ID NO: 680 - RNA, 44 nt, synthetic construct
  source 1..44: mol_type = other RNA
gcctggcaccattaaagaaaatatcatctttggcgtcagttacg

SEQ ID NO: 681 - RNA, 44 nt, synthetic construct
  source 1..44: mol_type = other RNA
gcctgggaccatcaaagaaaatatcatctttggtgtctcttatg

SEQ ID NO: 682 - RNA, 44 nt, synthetic construct
  source 1..44: mol_type = other RNA
gcctgggaccattaaagaaaatatcatctttggtgtctcttatg

SEQ ID NO: 683 - RNA, 44 nt, synthetic construct
  source 1..44: mol_type = other RNA
gcctgggaccattaaagaaaatatcatctttggtgtttcttatg

SEQ ID NO: 684 - RNA, 44 nt, synthetic construct
  source 1..44: mol_type = other RNA
gccgggcaccatcaaagaaaatatcatctttggtgtttcctatg

SEQ ID NO: 685 - RNA, 44 nt, synthetic construct
  source 1..44: mol_type = other RNA
gcctgggaccatcaaagaaaatatcatctttggtgtttcgtacg

SEQ ID NO: 686 - RNA, 44 nt, synthetic construct
  source 1..44: mol_type = other RNA
gccggggaccatcaaagagaatatcatctttggtgtctcttacg

SEQ ID NO: 687 - RNA, 44 nt, synthetic construct
  source 1..44: mol_type = other RNA
gcctggcaccattaaagaaaatatcatctttggtgtttcgtacg

SEQ ID NO: 688 - RNA, 44 nt, synthetic construct
  source 1..44: mol_type = other RNA
gcctgggaccatcaaagaaaatatcatctttggtgtctcgtacg

SEQ ID NO: 689 - RNA, 44 nt, synthetic construct
  source 1..44: mol_type = other RNA
cataggaaacaccaaagatgatattttctttaatcgtgccaggc

SEQ ID NO: 690 - RNA, 44 nt, synthetic construct
  source 1..44: mol_type = other RNA
gcctggcaccattaaagaaaatatcatctttggtgtgtcctatg

SEQ ID NO: 691 - RNA, 44 nt, synthetic construct
  source 1..44: mol_type = other RNA
cataggagacaccaaagatgatattttctttaatggtgccaggc

SEQ ID NO: 692 - RNA, 44 nt, synthetic construct
  source 1..44: mol_type = other RNA
gcctgggaccatcaaagaaaatatcatctttggtgtctcctacg

SEQ ID NO: 693 - RNA, 44 nt, synthetic construct
  source 1..44: mol_type = other RNA
cataggaaacaccgaagatgatattttctttaatggtgccaggc

SEQ ID NO: 694 - RNA, 44 nt, synthetic construct
  source 1..44: mol_type = other RNA
gcctggcaccatcaaagagaacatcatctttggtgtttcttatg

SEQ ID NO: 695 - RNA, 44 nt, synthetic construct
  source 1..44: mol_type = other RNA
gcccggaacaataaaagaaaacatcatcttcggcgtgtcgtacg

SEQ ID NO: 696 - RNA, 44 nt, synthetic construct
  source 1..44: mol_type = other RNA
gccgggcaccattaaagagaatatcatctttggtgtttcgtatg

SEQ ID NO: 697 - RNA, 44 nt, synthetic construct
  source 1..44: mol_type = other RNA
gccgggcaccattaaagaaaatatcatctttggtgtttcctatg

SEQ ID NO: 698 - RNA, 44 nt, synthetic construct
  source 1..44: mol_type = other RNA
ggcttgcaccatcaaggagaacatcatcttcggtgtttgatcat

SEQ ID NO: 699 - RNA, 44 nt, synthetic construct
  source 1..44: mol_type = other RNA
gcctggcaccatcaaagaaaatatcatctttggtgtctcttatg

SEQ ID NO: 700 - RNA, 44 nt, synthetic construct
  source 1..44: mol_type = other RNA
catacgaaacaccaaagatgatattttctttaatggtgccaggc

SEQ ID NO: 701 - RNA, 44 nt, synthetic construct
  source 1..44: mol_type = other RNA
gcctgggaccattaaagaaaatatcatctttggtgtttcatacg

SEQ ID NO: 702 - RNA, 44 nt, synthetic construct
  source 1..44: mol_type = other RNA
cataggaaacaccaaagatgatattttctttaatggtgcctggc

SEQ ID NO: 703 - RNA, 44 nt, synthetic construct
  source 1..44: mol_type = other RNA
gccaggaaccatcaaagagaatatcatctttggtgtctcttacg

SEQ ID NO: 704 - RNA, 44 nt, synthetic construct
  source 1..44: mol_type = other RNA
gccaggtaccattaaggaaaacatcatctttggcgtgtcgtatg

SEQ ID NO: 705 - RNA, 44 nt, synthetic construct
  source 1..44: mol_type = other RNA
gccaggcaccattaaagaaaatatcatctttggtgtttcctacg

SEQ ID NO: 706 - RNA, 44 nt, synthetic construct
  source 1..44: mol_type = other RNA
gcctggcaccattaaagagaatatcatctttggtgtttcatatg

SEQ ID NO: 707 - RNA, 44 nt, synthetic construct
  source 1..44: mol_type = other RNA
gcctgggaccattaaagaaaatatcatctttggtgtttcctacg

SEQ ID NO: 708 - RNA, 44 nt, synthetic construct
  source 1..44: mol_type = other RNA
gcctggcaccattaaagagaatatcatctttggtgtttcttatg

SEQ ID NO: 709 - RNA, 44 nt, synthetic construct
  source 1..44: mol_type = other RNA
cataggaaacaccaaagatgatattttctttaattgtgccaggc

SEQ ID NO: 710 - RNA, 44 nt, synthetic construct
  source 1..44: mol_type = other RNA
gcctggcaccattaaggaaaatatcatctttggtgtttcctatg

SEQ ID NO: 711 - RNA, 44 nt, synthetic construct
  source 1..44: mol_type = other RNA
gccgggaaccattaaagaaaatatcatctttggtgtttcctatg

SEQ ID NO: 712 - RNA, 44 nt, synthetic construct
  source 1..44: mol_type = other RNA
catagctaacaccaaagatgatgttctctttgatggtgccaggc

SEQ ID NO: 713 - RNA, 44 nt, synthetic construct
  source 1..44: mol_type = other RNA
catatgaaacaccaaagatgatgttctctttgatggtgccaggc

SEQ ID NO: 714 - RNA, 44 nt, synthetic construct
  source 1..44: mol_type = other RNA
gcccggcaccattaaagaaaatatcatctttggtgtttcctatg

SEQ ID NO: 715 - RNA, 44 nt, synthetic construct
  source 1..44: mol_type = other RNA
gcctgggaccatcaaagaaaatataatctttggtgtctcttacg

SEQ ID NO: 716 - RNA, 44 nt, synthetic construct
  source 1..44: mol_type = other RNA
gcctggtactattaaagaaaatatcatctttggcgtttcctatg

SEQ ID NO: 717 - RNA, 44 nt, synthetic construct
  source 1..44: mol_type = other RNA
gcctgggaccatcaaagaaaatatcatctttggtgtctcatacg

SEQ ID NO: 718 - RNA, 44 nt, synthetic construct
  source 1..44: mol_type = other RNA
gccagggaccatcaaagagaatatcatctttggtgtctcgtacg

SEQ ID NO: 719 - RNA, 44 nt, synthetic construct
  source 1..44: mol_type = other RNA
gccggggaccattaaagaaaatatcatctttggtgtttcctatg

SEQ ID NO: 720 - RNA, 44 nt, synthetic construct
  source 1..44: mol_type = other RNA
gcctggcacgattaaagaaaatatcatctttggtgtttcctatg

SEQ ID NO: 721 - RNA, 44 nt, synthetic construct
  source 1..44: mol_type = other RNA
gcctggcaccatcaaagaaaatatcatctttggtgtttcgtatg

SEQ ID NO: 722 - RNA, 44 nt, synthetic construct
  source 1..44: mol_type = other RNA
gcctggcaccattaaagaaaatattatctttggtgtttcctatg

SEQ ID NO: 723 - RNA, 44 nt, synthetic construct
  source 1..44: mol_type = other RNA
cataggaaacaccaaagatgatattctctttaatggtgccaggc

SEQ ID NO: 724 - RNA, 44 nt, synthetic construct
  source 1..44: mol_type = other RNA
gcctggcaccatcaaagaaaatatcatctttggtgtctcctatg

SEQ ID NO: 725 - RNA, 44 nt, synthetic construct
  source 1..44: mol_type = other RNA
gccgggcaccattaaagagaatatcatctttggtgtttcctatg

SEQ ID NO: 726 - RNA, 44 nt, synthetic construct
  source 1..44: mol_type = other RNA
gcctgggacaatcaaagagaatatcatcttcggtgtttcatacg

SEQ ID NO: 727 - RNA, 44 nt, synthetic construct
  source 1..44: mol_type = other RNA
gcctggaaccattaaagaaaatatcatctttggtgtttcgtatg

SEQ ID NO: 728 - RNA, 44 nt, synthetic construct
  source 1..44: mol_type = other RNA
gcctgggaccattaaagaaaatatcatctttggtgtctcatacg

SEQ ID NO: 729 - RNA, 44 nt, synthetic construct
  source 1..44: mol_type = other RNA
gcctggcaccattaaagaaaatatcatctttggcgtttcctatg

SEQ ID NO: 730 - RNA, 44 nt, synthetic construct
  source 1..44: mol_type = other RNA
gccgggcaccattaaagaaaatatcatctttggtgttagctatg

SEQ ID NO: 731 - RNA, 44 nt, synthetic construct
  source 1..44: mol_type = other RNA
ggctggcaccatcaaggagaacatcatcttcggtgtttcctcat

SEQ ID NO: 732 - RNA, 44 nt, synthetic construct
  source 1..44: mol_type = other RNA
gcctggcaccatcaaagaaaatatcatctttggtgtttcatatg

SEQ ID NO: 733 - RNA, 44 nt, synthetic construct
  source 1..44: mol_type = other RNA
gcctgggaccattaaagaaaatatcatctttggtgtttcgtacg

SEQ ID NO: 734 - RNA, 44 nt, synthetic construct
  source 1..44: mol_type = other RNA
gccaggcaccattaaagaaaatatcatctttggtgtttcttatg

SEQ ID NO: 735 - RNA, 44 nt, synthetic construct
  source 1..44: mol_type = other RNA
gcctggaacgataaaagagaacattatcttcggcgttagttatg

SEQ ID NO: 736 - RNA, 44 nt, synthetic construct
  source 1..44: mol_type = other RNA
gcctggcaccattaaagaaaatatcatctttggtgtctcctatg

SEQ ID NO: 737 - RNA, 44 nt, synthetic construct
  source 1..44: mol_type = other RNA
ggcttgcaccattaaagaaaatatcatctttggtgtttgatcat

SEQ ID NO: 738 - RNA, 44 nt, synthetic construct
  source 1..44: mol_type = other RNA
gcctggcaccattaaagaaaatatcatctttggagtttcctatg

SEQ ID NO: 739 - RNA, 44 nt, synthetic construct
  source 1..44: mol_type = other RNA
gcctggcactattaaagaaaatatcatctttggtgtttcctatg

SEQ ID NO: 740 - RNA, 44 nt, synthetic construct
  source 1..44: mol_type = other RNA
gccgggcaccattaaagaaaatatcatctttggtgtttcgtatg

SEQ ID NO: 741 - RNA, 44 nt, synthetic construct
  source 1..44: mol_type = other RNA
gcctggcaccattaaagaaaatatcatctttggtgtatcctatg

SEQ ID NO: 742 - RNA, 44 nt, synthetic construct
  source 1..44: mol_type = other RNA
gcctggaaccattaaagaaaatatcatctttggtgtttcctacg

SEQ ID NO: 743 - RNA, 44 nt, synthetic construct
  source 1..44: mol_type = other RNA
gcctggcaccattaaagaaaatataatctttggtgtttcctatg

SEQ ID NO: 744 - RNA, 44 nt, synthetic construct
  source 1..44: mol_type = other RNA
gcctggtacaatcaaggagaacatcatcttcggcgtctcctacg

SEQ ID NO: 745 - RNA, 44 nt, synthetic construct
  source 1..44: mol_type = other RNA
gccaggcaccattaaagaaaatatcatctttggtgtttcatatg

SEQ ID NO: 746 - RNA, 44 nt, synthetic construct
  source 1..44: mol_type = other RNA
gcctggcaccatcaaagaaaatatcatctttggtgtttcctatg

SEQ ID NO: 747 - RNA, 44 nt, synthetic construct
  source 1..44: mol_type = other RNA
gcctggcaccatcaaagaaaatatcatctttggtgtttcatacg

SEQ ID NO: 748 - RNA, 44 nt, synthetic construct
  source 1..44: mol_type = other RNA
gcctggtaccattaaagaaaatatcatctttggtgtttcctatg

SEQ ID NO: 749 - RNA, 44 nt, synthetic construct
  source 1..44: mol_type = other RNA
gcctggcaccattaaagagaatatcatctttggtgtttcgtatg

SEQ ID NO: 750 - RNA, 44 nt, synthetic construct
  source 1..44: mol_type = other RNA
cataggaaaccccaaagatgatattttctttaatggtgccaggc

SEQ ID NO: 751 - RNA, 44 nt, synthetic construct
  source 1..44: mol_type = other RNA
gccaggaacgattaaggagaacatcatctttggcgtgagctacg

SEQ ID NO: 752 - RNA, 44 nt, synthetic construct
  source 1..44: mol_type = other RNA
gcctgggaccatcaaagaaaatatcatctttggtgtttcctatg

SEQ ID NO: 753 - RNA, 44 nt, synthetic construct
  source 1..44: mol_type = other RNA
gcctggcaccataaaagaaaatatcatctttggtgtttcctatg

SEQ ID NO: 754 - RNA, 44 nt, synthetic construct
  source 1..44: mol_type = other RNA
cataggaaacaccaaagatgatattttccttaatggtgccaggc

SEQ ID NO: 755 - RNA, 44 nt, synthetic construct
  source 1..44: mol_type = other RNA
gcctggcaccatcaaagaaaatatcatctttggtgtctcgtacg

SEQ ID NO: 756 - RNA, 44 nt, synthetic construct
  source 1..44: mol_type = other RNA
gcctgggaccattaaagaaaatatcatctttggtgtctcctacg

SEQ ID NO: 757 - RNA, 44 nt, synthetic construct
  source 1..44: mol_type = other RNA
gccaggcaccattaaagaaaatatcatctttggtgtctcctatg

SEQ ID NO: 758 - RNA, 44 nt, synthetic construct
  source 1..44: mol_type = other RNA
gcctgggaccattaaagaaaatatcatctttggtgtctcgtatg

SEQ ID NO: 759 - RNA, 44 nt, synthetic construct
  source 1..44: mol_type = other RNA
cataggaaacaccaaagatgatattttctttaatagtgccaggc

SEQ ID NO: 760 - RNA, 44 nt, synthetic construct
  source 1..44: mol_type = other RNA
gcccggaactattaaggaaaacataatcttcggcgtatcatacg

SEQ ID NO: 761 - RNA, 44 nt, synthetic construct
  source 1..44: mol_type = other RNA
gcctggcaccatcaaagaaaatatcatctttggtgtttcgtacg

SEQ ID NO: 762 - RNA, 44 nt, synthetic construct
  source 1..44: mol_type = other RNA
gcctggcaccattaaagaaaatatcatcttcggtgtttcctatg

SEQ ID NO: 763 - RNA, 44 nt, synthetic construct
  source 1..44: mol_type = other RNA
gcctggcaccattaaagaaaatatcatctttggtgtctcgtatg

SEQ ID NO: 764 - RNA, 44 nt, synthetic construct
  source 1..44: mol_type = other RNA
catacgaaacaccaaagatgatattctctttaatggtgcccggc

SEQ ID NO: 765 - RNA, 44 nt, synthetic construct
  source 1..44: mol_type = other RNA
gcctggcaccattaaagaaaatatcatctttggggtttcctatg

SEQ ID NO: 766 - RNA, 44 nt, synthetic construct
  source 1..44: mol_type = other RNA
gcctggcaccatcaaagaaaatatcatctttggtgtctcctacg

SEQ ID NO: 767 - RNA, 44 nt, synthetic construct
  source 1..44: mol_type = other RNA
gcctgggaccatcaaagaaaatatcatctttggtgtttcatatg

SEQ ID NO: 768 - RNA, 44 nt, synthetic construct
  source 1..44: mol_type = other RNA
gcctggtacaattaaagaaaatatcatctttggagtttcctatg

SEQ ID NO: 769 - RNA, 44 nt, synthetic construct
  source 1..44: mol_type = other RNA
gcctggcaccattaaagaaaatatcatctttggtgtctcttacg

SEQ ID NO: 770 - RNA, 44 nt, synthetic construct
  source 1..44: mol_type = other RNA
gcctgggaccattaaagaaaatatcatctttggtgtttcttacg

SEQ ID NO: 771 - RNA, 44 nt, synthetic construct
  source 1..44: mol_type = other RNA
gccaggaaccatcaaagagaatatcatctttggtgtctcgtacg

SEQ ID NO: 772 - RNA, 44 nt, synthetic construct
  source 1..44: mol_type = other RNA
gcctggcaccattaaagaaaatatcatctttggtgtttcttacg

SEQ ID NO: 773 - RNA, 44 nt, synthetic construct
  source 1..44: mol_type = other RNA
gcctgggaccatcaaagaaaatatcatctttggtgtttcctacg

SEQ ID NO: 774 - RNA, 44 nt, synthetic construct
  source 1..44: mol_type = other RNA
gccggggaccatcaaagagaatatcatctttggtgtctcgtacg

SEQ ID NO: 775 - RNA, 44 nt, synthetic construct
  source 1..44: mol_type = other RNA
gcctggcaccatcaaggagaacataatattcggcgtctcctacg

SEQ ID NO: 776 - RNA, 44 nt, synthetic construct
  source 1..44: mol_type = other RNA
gcctggcaccattaaagagaatatcatctttggtgtttcctacg

SEQ ID NO: 777 - RNA, 44 nt, synthetic construct
  source 1..44: mol_type = other RNA
gcctggcaccatcaaagagaacatcatctttggtgttagctatg

SEQ ID NO: 778 - RNA, 44 nt, synthetic construct
  source 1..44: mol_type = other RNA
gcctggcaccatcaaagaaaatatcatctttggtgtttcttatg

SEQ ID NO: 779 - RNA, 44 nt, synthetic construct
  source 1..44: mol_type = other RNA
gccaggaaccatcaaagagaatatcatctttggtgtctcatacg

SEQ ID NO: 780 - RNA, 44 nt, synthetic construct
  source 1..44: mol_type = other RNA
gcctggcacaattaaagaaaatatcatctttggtgtttcctatg

SEQ ID NO: 781 - RNA, 44 nt, synthetic construct
  source 1..44: mol_type = other RNA
gccgggcaccattaaagaaaatatcatctttggtgtctcctatg

SEQ ID NO: 782 - RNA, 44 nt, synthetic construct
  source 1..44: mol_type = other RNA
cgtaactgacgccaaagatgatattttctttaatggtgccaggc

SEQ ID NO: 783 - RNA, 44 nt, synthetic construct
  source 1..44: mol_type = other RNA
gcctggcaccatcaaagaaaatatcatctttggtgtttcttacg

SEQ ID NO: 784 - RNA, 44 nt, synthetic construct
  source 1..44: mol_type = other RNA
gcctggtacaattaaagaaaatatcatctttggggtttcctatg

SEQ ID NO: 785 - RNA, 44 nt, synthetic construct
  source 1..44: mol_type = other RNA
gcctggcaccattaaagaaaatatcatctttggtgtctcatacg

SEQ ID NO: 786 - RNA, 44 nt, synthetic construct
  source 1..44: mol_type = other RNA
cataggaaacaccaaagatgatattttctttaatggtaccaggc

SEQ ID NO: 787 - RNA, 44 nt, synthetic construct
  source 1..44: mol_type = other RNA
gccaggcaccattaaagagaatatcatctttggtgtttcctatg

SEQ ID NO: 788 - RNA, 44 nt, synthetic construct
  source 1..44: mol_type = other RNA
gcctggaaccattaaagagaatatcatctttggtgtttcctatg

SEQ ID NO: 789 - RNA, 44 nt, synthetic construct
  source 1..44: mol_type = other RNA
gccagggaccatcaaagagaatatcatctttggtgtctcttacg

SEQ ID NO: 790 - RNA, 44 nt, synthetic construct
  source 1..44: mol_type = other RNA
gcctggcaccattaaagaaaacatcatctttggtgtttcctatg

SEQ ID NO: 791 - RNA, 44 nt, synthetic construct
  source 1..44: mol_type = other RNA
gccgggcaccattaaagaaaatatcatctttggtgtttcctacg

SEQ ID NO: 792 - RNA, 44 nt, synthetic construct
  source 1..44: mol_type = other RNA
gcctgggaccatcaaagaaaatatcatctttggtgtttcgtatg

SEQ ID NO: 793 - RNA, 44 nt, synthetic construct
  source 1..44: mol_type = other RNA
gcctggcaccattaaagagaatatcatctttggtgttagctatg

SEQ ID NO: 794 - RNA, 44 nt, synthetic construct
  source 1..44: mol_type = other RNA
cataggaaactccaaagatgatattttctttaatggtgccaggc

SEQ ID NO: 795 - RNA, 44 nt, synthetic construct
  source 1..44: mol_type = other RNA
gcctggcaccatcaaagaaaatatcatctttggtgtctcttacg

SEQ ID NO: 796 - RNA, 44 nt, synthetic construct
  source 1..44: mol_type = other RNA
gcctgggaccattaaagagaatatcatctttggtgtttcctatg

SEQ ID NO: 797 - RNA, 44 nt, synthetic construct
  source 1..44: mol_type = other RNA
gcccggcacgatcaaggagaatattatcttcggtgttagctatg

SEQ ID NO: 798 - RNA, 44 nt, synthetic construct
  source 1..44: mol_type = other RNA
gccaggaaccattaaagaaaatatcatctttggtgtttcctatg

SEQ ID NO: 799 - RNA, 44 nt, synthetic construct
  source 1..44: mol_type = other RNA
cataggaaacaccaaagatgatattttctttgatggtgccaggc

SEQ ID NO: 800 - RNA, 44 nt, synthetic construct
  source 1..44: mol_type = other RNA
gcctgggaccatcaaagaaaatatcatctttggtgtttcttacg

SEQ ID NO: 801 - RNA, 44 nt, synthetic construct
  source 1..44: mol_type = other RNA
catagctaacaccaaagatgatgttctctttgatggtgcccggc

SEQ ID NO: 802 - RNA, 44 nt, synthetic construct
  source 1..44: mol_type = other RNA
gcctgggaccattaaagaaaatatcatctttggtgtctcgtacg

SEQ ID NO: 803 - RNA, 44 nt, synthetic construct
  source 1..44: mol_type = other RNA
gcctgggactatcaaagaaaatatcatctttggtgtctcgtacg

SEQ ID NO: 804 - RNA, 44 nt, synthetic construct
  source 1..44: mol_type = other RNA
gcctggcaccattaaagaaaatatcatctttggtgtctcatatg

SEQ ID NO: 805 - RNA, 44 nt, synthetic construct
  source 1..44: mol_type = other RNA
gcctggaaccattaaagaaaatatcatctttggtgtttcatatg

SEQ ID NO: 806 - RNA, 44 nt, synthetic construct
  source 1..44: mol_type = other RNA
gccagggaccatcaaagagaatatcatctttggtgtctcatacg

SEQ ID NO: 807 - RNA, 44 nt, synthetic construct
  source 1..44: mol_type = other RNA
gcctggtactattaaagaaaatatcatctttggagtttcctatg

SEQ ID NO: 808 - RNA, 44 nt, synthetic construct
  source 1..44: mol_type = other RNA
gcccgggacgatcaaagagaacatcatctttggcgtctcctacg

SEQ ID NO: 809 - RNA, 44 nt, synthetic construct
  source 1..44: mol_type = other RNA
gcctggcactattaaggagaatatcatcttcggggtatcatacg

SEQ ID NO: 810 - RNA, 44 nt, synthetic construct
  source 1..44: mol_type = other RNA
gccgggaaccatcaaagagaatatcatctttggtgtctcgtacg

SEQ ID NO: 811 - RNA, 44 nt, synthetic construct
  source 1..44: mol_type = other RNA
catacgaaacaccaaagatgatattttctttaatggtgcccggc

SEQ ID NO: 812 - RNA, 44 nt, synthetic construct
  source 1..44: mol_type = other RNA
cataggaaacaccaaagatgatattttcttttatggtgccaggc

SEQ ID NO: 813 - RNA, 44 nt, synthetic construct
  source 1..44: mol_type = other RNA
cataggaaacaccaaagatgatgttttctttaatggtgccaggc

SEQ ID NO: 814 - RNA, 44 nt, synthetic construct
  source 1..44: mol_type = other RNA
cataagaaacaccaaagatgatattttctttaatggtgccaggc

SEQ ID NO: 815 - RNA, 44 nt, synthetic construct
  source 1..44: mol_type = other RNA
gcctgggaccattaaagaaaatatcatctttggtgtttcctatg

SEQ ID NO: 816 - RNA, 44 nt, synthetic construct
  source 1..44: mol_type = other RNA
gcctgggaccatcaaagaaaatatcatctttggtgtttcttatg

SEQ ID NO: 817 - RNA, 45 nt, synthetic construct
  source 1..45: mol_type = other RNA
tcataggaaacaccaaagatgatattttctttaatggtgccaggc

SEQ ID NO: 818 - RNA, 45 nt, synthetic construct
  source 1..45: mol_type = other RNA
tgcctggcaccattaaagaaaatatcatctttggtgtttcctatg

SEQ ID NO: 819 - RNA, 46 nt, synthetic construct
  source 1..46: mol_type = other RNA
atcataggaaacaccaaagatgatattttctttaatggtgccaggc

SEQ ID NO: 820 - RNA, 46 nt, synthetic construct
  source 1..46: mol_type = other RNA
atgcctggcaccattaaagaaaatatcatctttggtgtttcctatg

SEQ ID NO: 821 - RNA, 47 nt, synthetic construct
  source 1..47: mol_type = other RNA
catcataggaaacaccaaagatgatattttctttaatggtgccaggc

SEQ ID NO: 822 - RNA, 47 nt, synthetic construct
  source 1..47: mol_type = other RNA
tatgcctggcaccattaaagaaaatatcatctttggtgtttcctatg

SEQ ID NO: 823 - RNA, 48 nt, synthetic construct
  source 1..48: mol_type = other RNA
tcatcataggaaacaccaaagatgatattttctttaatggtgccaggc

SEQ ID NO: 824 - RNA, 49 nt, synthetic construct
  source 1..49: mol_type = other RNA
ttcatcataggaaacaccaaagatgatattttctttaatggtgccaggc

SEQ ID NO: 825 - RNA, 50 nt, synthetic construct
  source 1..50: mol_type = other RNA
attcatcataggaaacaccaaagatgatattttctttaatggtgccaggc

SEQ ID NO: 826 - RNA, 119 nt, synthetic construct
  source 1..119: mol_type = other RNA
gttcatcataggaaacaccaagttttagagctagaaatagcaagttaaaataaggctagtccgttatcaacttgaaaaagtggcaccgagtcggtgcaatatcatctttggtgtttcca

SEQ ID NO: 827 - RNA, 119 nt, synthetic construct
  source 1..119: mol_type = other RNA
gttcatcataggaaacaccaagttttagagctagaaatagcaagttaaaataaggctagtccgttatcaacttgaaaaagtggcaccgagtcggtgcaatatcatctttggtgtttcct

SEQ ID NO: 828 - RNA, 121 nt, synthetic construct
  source 1..121: mol_type = other RNA
gttcatcataggaaacaccaagttttagagctagaaatagcaagttaaaataaggctagtccgttatcaacttgaaaaagtggcaccgagtcggtgcaatatcatctttggtgtttcctaa

SEQ ID NO: 829 - RNA, 121 nt, synthetic construct
  source 1..121: mol_type = other RNA
gttcatcataggaaacaccaagttttagagctagaaatagcaagttaaaataaggctagtccgttatcaacttgaaaaagtggcaccgagtcggtgcaatatcatctttggtgtttcctat

SEQ ID NO: 830 - RNA, 122 nt, synthetic construct
  source 1..122: mol_type = other RNA
gttcatcataggaaacaccaagttttagagctagaaatagcaagttaaaataaggctagtccgttatcaacttgaaaaagtggcaccgagtcggtgcgaaaatatcatctttggtgtttcca

SEQ ID NO: 831 - RNA, 122 nt, synthetic construct
  source 1..122: mol_type = other RNA
gttcatcataggaaacaccaagttttagagctagaaatagcaagttaaaataaggctagtccgttatcaacttgaaaaagtggcaccgagtcggtgcgaaaatatcatctttggtgtttcct

SEQ ID NO: 832 - RNA, 122 nt, synthetic construct
  source 1..122: mol_type = other RNA
gttcatcataggaaacaccaagttttagagctagaaatagcaagttaaaataaggctagtccgttatcaacttgaaaaagtggcaccgagtcggtgcaatatcatctttggtgtttcctatg

SEQ ID NO: 833 - RNA, 124 nt, synthetic construct
  source 1..124: mol_type = other RNA
gttcatcataggaaacaccaagttttagagctagaaatagcaagttaaaataaggctagtccgttatcaacttgaaaaagtggcaccgagtcggtgcaagaaaatatcatctttggtgtttcca

SEQ ID NO: 834 - RNA, 124 nt, synthetic construct
  source 1..124: mol_type = other RNA
gttcatcataggaaacaccaagttttagagctagaaatagcaagttaaaataaggctagtccgttatcaacttgaaaaagtggcaccgagtcggtgcaagaaaatatcatctttggtgtttcct

SEQ ID NO: 835 - RNA, 124 nt, synthetic construct
  source 1..124: mol_type = other RNA
gttcatcataggaaacaccaagttttagagctagaaatagcaagttaaaataaggctagtccgttatcaacttgaaaaagtggcaccgagtcggtgcgaaaatatcatctttggtgtttcctaa

SEQ ID NO: 836 - RNA, 124 nt, synthetic construct
  source 1..124: mol_type = other RNA
gttcatcataggaaacaccaagttttagagctagaaatagcaagttaaaataaggctagtccgttatcaacttgaaaaagtggcaccgagtcggtgcgaaaatatcatctttggtgtttcctat

SEQ ID NO: 837 - RNA, 124 nt, synthetic construct
  source 1..124: mol_type = other RNA
gttcatcataggaaacaccaagttttagagctagaaatagcaagttaaaataaggctagtccgttatcaacttgaaaaagtggcaccgagtcggtgcaatatcatctttggtgtttcctatgaa

SEQ ID NO: 838 - RNA, 124 nt, synthetic construct
  source 1..124: mol_type = other RNA
gttcatcataggaaacaccaagttttagagctagaaatagcaagttaaaataaggctagtccgttatcaacttgaaaaagtggcaccgagtcggtgcaatatcatctttggtgtttcctatgat

SEQ ID NO: 839 - RNA, 124 nt, synthetic construct
  source 1..124: mol_type = other RNA
gcatcataggaaacaccaagttttagagctagaaatagcaagttaaaataaggctagtccgttatcaacttgaaaaagtggcaccgagtcggtgcaagaaaatatcatctttggtgtttcctat

SEQ ID NO: 840 - RNA, 125 nt, synthetic construct
  source 1..125: mol_type = other RNA
gttcatcataggaaacaccaagttttagagctagaaatagcaagttaaaataaggctagtccgttatcaacttgaaaaagtggcaccgagtcggtgcgaaaatatcatctttggtgtttcctatg

SEQ ID NO: 841 - RNA, 125 nt, synthetic construct
  source 1..125: mol_type = other RNA
gttcatcataggaaacaccaagttttagagctagaaatagcaagttaaaataaggctagtccgttatcaacttgaaaaagtggcaccgagtcggtgcaatatcatctttggtgtttcctatgatg

SEQ ID NO: 842 - RNA, 126 nt, synthetic construct
  source 1..126: mol_type = other RNA
gttcatcataggaaacaccaagttttagagctagaaatagcaagttaaaataaggctagtccgttatcaacttgaaaaagtggcaccgagtcggtgctaaagaaaatatcatctttggtgtttcca

SEQ ID NO: 843 - RNA, 126 nt, synthetic construct
  source 1..126: mol_type = other RNA
gttcatcataggaaacaccaagttttagagctagaaatagcaagttaaaataaggctagtccgttatcaacttgaaaaagtggcaccgagtcggtgctaaagaaaatatcatctttggtgtttcct

SEQ ID NO: 844 - RNA, 126 nt, synthetic construct
  source 1..126: mol_type = other RNA
gttcatcataggaaacaccaagttttagagctagaaatagcaagttaaaataaggctagtccgttatcaacttgaaaaagtggcaccgagtcggtgcaagaaaatatcatctttggtgtttcctaa

SEQ ID NO: 845 - RNA, 126 nt, synthetic construct
  source 1..126: mol_type = other RNA
gttcatcataggaaacaccaagttttagagctagaaatagcaagttaaaataaggctagtccgttatcaacttgaaaaagtggcaccgagtcggtgcaagaaaatatcatctttggtgtttcctat

SEQ ID NO: 846 - RNA, 126 nt, synthetic construct
  source 1..126: mol_type = other RNA
gttcatcataggaaacaccaagttttagagctagaaatagcaagttaaaataaggctagtccgttatcaacttgaaaaagtggcaccgagtcggtgcaagaaaatatcatcttcggtgtttcctat

SEQ ID NO: 847 - RNA, 126 nt, synthetic construct
  source 1..126: mol_type = other RNA
gttcatcataggaaacaccaagttttagagctagaaatagcaagttaaaataaggctagtccgttatcaacttgaaaaagtggcaccgagtcggtgcaagaaaatatcatatttggtgtttcctat

SEQ ID NO: 848 - RNA, 126 nt, synthetic construct
  source 1..126: mol_type = other RNA
gttcatcataggaaacaccaagttttagagctagaaatagcaagttaaaataaggctagtccgttatcaacttgaaaaagtggcaccgagtcggtgcaagaaaatatcatttttggtgtttcctat

SEQ ID NO: 849 - RNA, 126 nt, synthetic construct
  source 1..126: mol_type = other RNA
gttcatcataggaaacaccaagttttagagctagaaatagcaagttaaaataaggctagtccgttatcaacttgaaaaagtggcaccgagtcggtgcaagaaaatatcatattcggtgtttcctat

SEQ ID NO: 850 - RNA, 126 nt, synthetic construct
  source 1..126: mol_type = other RNA
gttcatcataggaaacaccaagttttagagctagaaatagcaagttaaaataaggctagtccgttatcaacttgaaaaagtggcaccgagtcggtgcaagaaaatatcattttcggtgtttcctat

SEQ ID NO: 851 - RNA, 127 nt, synthetic construct
  source 1..127: mol_type = other RNA
gttcatcataggaaacaccaagttttagagctagaaatagcaagttaaaataaggctagtccgttatcaacttgaaaaagtggcaccgagtcggtgcaagaaaatatcatctttggtgtttcctatg

SEQ ID NO: 852 - RNA, 127 nt, synthetic construct
  source 1..127: mol_type = other RNA
gttcatcataggaaacaccaagttttagagctagaaatagcaagttaaaataaggctagtccgttatcaacttgaaaaagtggcaccgagtcggtgcgaaaatatcatctttggtgtttcctatgaa

SEQ ID NO: 853 - RNA, 127 nt, synthetic construct
  source 1..127: mol_type = other RNA
gttcatcataggaaacaccaagttttagagctagaaatagcaagttaaaataaggctagtccgttatcaacttgaaaaagtggcaccgagtcggtgcgaaaatatcatctttggtgtttcctatgat

SEQ ID NO: 854 - RNA, 128 nt, synthetic construct
  source 1..128: mol_type = other RNA
gttcatcataggaaacaccaagttttagagctagaaatagcaagttaaaataaggctagtccgttatcaacttgaaaaagtggcaccgagtcggtgcattaaagaaaatatcatctttggtgtttcca

SEQ ID NO: 855 - RNA, 128 nt, synthetic construct
  source 1..128: mol_type = other RNA
gttcatcataggaaacaccaagttttagagctagaaatagcaagttaaaataaggctagtccgttatcaacttgaaaaagtggcaccgagtcggtgcattaaagaaaatatcatctttggtgtttcct

SEQ ID NO: 856 - RNA, 128 nt, synthetic construct
  source 1..128: mol_type = other RNA
gttcatcataggaaacaccaagttttagagctagaaatagcaagttaaaataaggctagtccgttatcaacttgaaaaagtggcaccgagtcggtgctaaagaaaatatcatctttggtgtttcctaa

SEQ ID NO: 857 - RNA, 128 nt, synthetic construct
  source 1..128: mol_type = other RNA
gttcatcataggaaacaccaagttttagagctagaaatagcaagttaaaataaggctagtccgttatcaacttgaaaaagtggcaccgagtcggtgctaaagaaaatatcatctttggtgtttcctat

SEQ ID NO: 858 - RNA, 128 nt, synthetic construct
  source 1..128: mol_type = other RNA
gttcatcataggaaacaccaagttttagagctagaaatagcaagttaaaataaggctagtccgttatcaacttgaaaaagtggcaccgagtcggtgcgaaaatatcatctttggtgtttcctatgatg

SEQ ID NO: 859 - RNA, 128 nt, synthetic construct
  source 1..128: mol_type = other RNA
gtattcatcataggaaacaccaagttttagagctagaaatagcaagttaaaataaggctagtccgttatcaacttgaaaaagtggcaccgagtcggtgcaagaaaatatcatctttggtgtttcctat

SEQ ID NO: 860 - RNA, 128 nt, synthetic construct
  source 1..128: mol_type = other RNA
gcatcataggaaacaccaagttttagagctagaaatagcaagttaaaataaggctagtccgttatcaacttgaaaaagtggcaccgagtcggtgcattaaagaaaatatcatctttggtgtttcctat

SEQ ID NO: 861 - RNA, 129 nt, synthetic construct
  source 1..129: mol_type = other RNA
gttcatcataggaaacaccaagttttagagctagaaatagcaagttaaaataaggctagtccgttatcaacttgaaaaagtggcaccgagtcggtgctaaagaaaatatcatctttggtgtttcctatg

SEQ ID NO: 862 - RNA, 129 nt, synthetic construct
  source 1..129: mol_type = other RNA
gttcatcataggaaacaccaagttttagagctagaaatagcaagttaaaataaggctagtccgttatcaacttgaaaaagtggcaccgagtcggtgcaagaaaatatcatctttggtgtttcctatgaa

SEQ ID NO: 863 - RNA, 129 nt, synthetic construct
  source 1..129: mol_type = other RNA
gttcatcataggaaacaccaagttttagagctagaaatagcaagttaaaataaggctagtccgttatcaacttgaaaaagtggcaccgagtcggtgcaagaaaatatcatctttggtgtttcctatgat

SEQ ID NO: 864 - RNA, 129 nt, synthetic construct
  source 1..129: mol_type = other RNA
gattatgcctggcaccattaagttttagagctagaaatagcaagttaaaataaggctagtccgttatcaacttgaaaaagtggcaccgagtcggtgcaccaaagatgatattttctttaatggtgccag

SEQ ID NO: 865 - RNA, 130 nt, synthetic construct
  source 1..130: mol_type = other RNA
gttcatcataggaaacaccaagttttagagctagaaatagcaagttaaaataaggctagtccgttatcaacttgaaaaagtggcaccgagtcggtgcattaaagaaaatatcatctttggtgtttcctaa

SEQ ID NO: 866 - RNA, 130 nt, synthetic construct
  source 1..130: mol_type = other RNA
gttcatcataggaaacaccaagttttagagctagaaatagcaagttaaaataaggctagtccgttatcaacttgaaaaagtggcaccgagtcggtgcattaaagaaaatatcatctttggtgtttcctat

SEQ ID NO: 867 - RNA, 130 nt, synthetic construct
  source 1..130: mol_type = other RNA
gttcatcataggaaacaccaagttttagagctagaaatagcaagttaaaataaggctagtccgttatcaacttgaaaaagtggcaccgagtcggtgcaagaaaatatcatctttggtgtttcctatgatg

SEQ ID NO: 868 - RNA, 130 nt, synthetic construct
  source 1..130: mol_type = other RNA
gttcatcataggaaacaccaagttttagagctagaaatagcaagttaaaataaggctagtccgttatcaacttgaaaaagtggcaccgagtcggtgcattaaagaaaatatcatcttcggtgtttcctat

SEQ ID NO: 869 - RNA, 130 nt, synthetic construct
  source 1..130: mol_type = other RNA
gttcatcataggaaacaccaagttttagagctagaaatagcaagttaaaataaggctagtccgttatcaacttgaaaaagtggcaccgagtcggtgcattaaagaaaatatcatatttggtgtttcctat

SEQ ID NO: 870 - RNA, 130 nt, synthetic construct
  source 1..130: mol_type = other RNA
gttcatcataggaaacaccaagttttagagctagaaatagcaagttaaaataaggctagtccgttatcaacttgaaaaagtggcaccgagtcggtgcattaaagaaaatatcatttttggtgtttcctat

SEQ ID NO: 871 - RNA, 130 nt, synthetic construct
  source 1..130: mol_type = other RNA
gttcatcataggaaacaccaagttttagagctagaaatagcaagttaaaataaggctagtccgttatcaacttgaaaaagtggcaccgagtcggtgcattaaagaaaatatcatattcggtgtttcctat

SEQ ID NO: 872 - RNA, 130 nt, synthetic construct
  source 1..130: mol_type = other RNA
gttcatcataggaaacaccaagttttagagctagaaatagcaagttaaaataaggctagtccgttatcaacttgaaaaagtggcaccgagtcggtgcattaaagaaaatatcattttcggtgtttcctat

SEQ ID NO: 873 - RNA, 131 nt, synthetic construct
  source 1..131: mol_type = other RNA
gttcatcataggaaacaccaagttttagagctagaaatagcaagttaaaataaggctagtccgttatcaacttgaaaaagtggcaccgagtcggtgcaccattaaagaaaatatcatctttggtgtttcca

SEQ ID NO: 874 - RNA, 131 nt, synthetic construct
  source 1..131: mol_type = other RNA
gttcatcataggaaacaccaagttttagagctagaaatagcaagttaaaataaggctagtccgttatcaacttgaaaaagtggcaccgagtcggtgcaccattaaagaaaatatcatctttggtgtttcct

SEQ ID NO: 875 - RNA, 131 nt, synthetic construct
  source 1..131: mol_type = other RNA
gttcatcataggaaacaccaagttttagagctagaaatagcaagttaaaataaggctagtccgttatcaacttgaaaaagtggcaccgagtcggtgcattaaagaaaatatcatctttggtgtttcctatg

SEQ ID NO: 876 - RNA, 131 nt, synthetic construct
  source 1..131: mol_type = other RNA
gttcatcataggaaacaccaagttttagagctagaaatagcaagttaaaataaggctagtccgttatcaacttgaaaaagtggcaccgagtcggtgctaaagaaaatatcatctttggtgtttcctatgaa

SEQ ID NO: 877 - RNA, 131 nt, synthetic construct
  source 1..131: mol_type = other RNA
gttcatcataggaaacaccaagttttagagctagaaatagcaagttaaaataaggctagtccgttatcaacttgaaaaagtggcaccgagtcggtgctaaagaaaatatcatctttggtgtttcctatgat

SEQ ID NO: 878 - RNA, 131 nt, synthetic construct
  source 1..131: mol_type = other RNA
gctatattcatcataggaaacaccaagttttagagctagaaatagcaagttaaaataaggctagtccgttatcaacttgaaaaagtggcaccgagtcggtgcaagaaaatatcatctttggtgtttcctat

SEQ ID NO: 879 - RNA, 131 nt, synthetic construct
  source 1..131: mol_type = other RNA
gaccattaaagaaaatatcatgttttagagctagaaatagcaagttaaaataaggctagtccgttatcaacttgaaaaagtggcaccgagtcggtgcataggaaacaccaaagatgatattttctttaatg

SEQ ID NO: 880 - RNA, 131 nt, synthetic construct
  source 1..131: mol_type = other RNA
gctgtatctatattcatcatagttttagagctagaaatagcaagttaaaataaggctagtccgttatcaacttgaaaaagtggcaccgagtcggtgcatcatctttggtgtttcctatgatgaatatagaa

SEQ ID NO: 881 - RNA, 132 nt, synthetic construct
  source 1..132: mol_type = other RNA
gttcatcataggaaacaccaagttttagagctagaaatagcaagttaaaataaggctagtccgttatcaacttgaaaaagtggcaccgagtcggtgctaaagaaaatatcatctttggtgtttcctatgatg

SEQ ID NO: 882 - RNA, 132 nt, synthetic construct
  source 1..132: mol_type = other RNA
gtattcatcataggaaacaccaagttttagagctagaaatagcaagttaaaataaggctagtccgttatcaacttgaaaaagtggcaccgagtcggtgcattaaagaaaatatcatctttggtgtttcctat

SEQ ID NO: 883 - RNA, 132 nt, synthetic construct
  source 1..132: mol_type = other RNA
gtctgtatctatattcatcatgttttagagctagaaatagcaagttaaaataaggctagtccgttatcaacttgaaaaagtggcaccgagtcggtgcatcatctttggtgtttcctatgatgaatatagata

SEQ ID NO: 884 - RNA, 133 nt, synthetic construct
  source 1..133: mol_type = other RNA
gttcatcataggaaacaccaagttttagagctagaaatagcaagttaaaataaggctagtccgttatcaacttgaaaaagtggcaccgagtcggtgcaccattaaagaaaatatcatctttggtgtttcctaa

SEQ ID NO: 885 - RNA, 133 nt, synthetic construct
  source 1..133: mol_type = other RNA
gttcatcataggaaacaccaagttttagagctagaaatagcaagttaaaataaggctagtccgttatcaacttgaaaaagtggcaccgagtcggtgcaccattaaagaaaatatcatctttggtgtttcctat

SEQ ID NO: 886 - RNA, 133 nt, synthetic construct
  source 1..133: mol_type = other RNA
gttcatcataggaaacaccaagttttagagctagaaatagcaagttaaaataaggctagtccgttatcaacttgaaaaagtggcaccgagtcggtgcattaaagaaaatatcatctttggtgtttcctatgaa

SEQ ID NO: 887 - RNA, 133 nt, synthetic construct
  source 1..133: mol_type = other RNA
gttcatcataggaaacaccaagttttagagctagaaatagcaagttaaaataaggctagtccgttatcaacttgaaaaagtggcaccgagtcggtgcattaaagaaaatatcatctttggtgtttcctatgat

SEQ ID NO: 888 - RNA, 134 nt, synthetic construct
  source 1..134: mol_type = other RNA
gttcatcataggaaacaccaagttttagagctagaaatagcaagttaaaataaggctagtccgttatcaacttgaaaaagtggcaccgagtcggtgcaccattaaagaaaatatcatctttggtgtttcctatg

SEQ ID NO: 889 - RNA, 134 nt, synthetic construct
  source 1..134: mol_type = other RNA
gttcatcataggaaacaccaagttttagagctagaaatagcaagttaaaataaggctagtccgttatcaacttgaaaaagtggcaccgagtcggtgcattaaagaaaatatcatctttggtgtttcctatgatg

SEQ ID NO: 890 - RNA, 135 nt, synthetic construct
  source 1..135: mol_type = other RNA
gctatattcatcataggaaacaccaagttttagagctagaaatagcaagttaaaataaggctagtccgttatcaacttgaaaaagtggcaccgagtcggtgcattaaagaaaatatcatctttggtgtttcctat

SEQ ID NO: 891 - RNA, 136 nt, synthetic construct
  source 1..136: mol_type = other RNA
gttcatcataggaaacaccaagttttagagctagaaatagcaagttaaaataaggctagtccgttatcaacttgaaaaagtggcaccgagtcggtgcaccattaaagaaaatatcatctttggtgtttcctatgaa

SEQ ID NO: 892 - RNA, 136 nt, synthetic construct
  source 1..136: mol_type = other RNA
gttcatcataggaaacaccaagttttagagctagaaatagcaagttaaaataaggctagtccgttatcaacttgaaaaagtggcaccgagtcggtgcaccattaaagaaaatatcatctttggtgtttcctatgat

SEQ ID NO: 893 - RNA, 137 nt, synthetic construct
  source 1..137: mol_type = other RNA
gttcatcataggaaacaccaagttttagagctagaaatagcaagttaaaataaggctagtccgttatcaacttgaaaaagtggcaccgagtcggtgcaccattaaagaaaatatcatctttggtgtttcctatgatg

SEQ ID NO: 894 - RNA, 142 nt, synthetic construct
  source 1..142: mol_type = other RNA
gcagttttcctggattatgccgttttagagctagaaatagcaagttaaaataaggctagtccgttatcaacttgaaaaagtggcaccgagtcggtgcaccaaagatgatattttctttaatggtgccaggcataatccagga

SEQ ID NO: 895 - RNA, 150 nt, synthetic construct
  source 1..150: mol_type = other RNA
gtctgtatctatattcatcatgtttaagagctagaaatagcaagtttaaataaggctagtccgttatcagcgtgaaaacgcggcaccgagtcggtgcattaaagaaaatatcatctttggtgtttcctatgatgaatatagataaccaaa

SEQ ID NO: 896 - RNA, 150 nt, synthetic construct
  source 1..150: mol_type = other RNA
gtctgtatctatattcatcatgtttaagagctagaaatagcaagtttaaataaggctagtccgttatcagcgtgaaaacgcggcaccgagtcggtgcattaaagaaaatatcatctttggtgtttcctatgatgaatatagatagatatt

SEQ ID NO: 897 - RNA, 150 nt, synthetic construct
  source 1..150: mol_type = other RNA
gtctgtatctatattcatcatgtttaagagctagaaatagcaagtttaaataaggctagtccgttatcagcgtgaaaacgcggcaccgagtcggtgcattaaagaaaatatcatctttggtgtttcctatgatgaatatagataggaaac

SEQ ID NO: 898 - RNA, 150 nt, synthetic construct
  source 1..150: mol_type = other RNA
gtctgtatctatattcatcatgtttaagagctagaaatagcaagtttaaataaggctagtccgttatcagcgtgaaaacgcggcaccgagtcggtgcattaaagaaaatatcatctttggtgtttcctatgatgaatatagataccaaag

SEQ ID NO: 899 - RNA, 150 nt, synthetic construct
  source 1..150: mol_type = other RNA
gtctgtatctatattcatcatgtttaagagctagaaatagcaagtttaaataaggctagtccgttatcagcgtgaaaacgcggcaccgagtcggtgcattaaagaaaatatcatctttggtgtttcctatgatgaatatagataattttc

SEQ ID NO: 900 - RNA, 150 nt, synthetic construct
  source 1..150: mol_type = other RNA
gtctgtatctatattcatcatgtttaagagctagaaatagcaagtttaaataaggctagtccgttatcagcgtgaaaacgcggcaccgagtcggtgcattaaagaaaatatcatctttggtgtttcctatgatgaatatagatacaccaa

SEQ ID NO: 901 - RNA, 152 nt, synthetic construct
  source 1..152: mol_type = other RNA
gtctgtatctatattcatcatgtttaagagctagaaatagcaagtttaaataaggctagtccgttatcagcgtgaaaacgcggcaccgagtcggtgcattaaagaaaatatcatctttggtgtttcctatgatgaatatagataagatgata

SEQ ID NO: 902 - RNA, 152 nt, synthetic construct
  source 1..152: mol_type = other RNA
gtctgtatctatattcatcatgtttaagagctagaaatagcaagtttaaataaggctagtccgttatcagcgtgaaaacgcggcaccgagtcggtgcattaaagaaaatatcatctttggtgtttcctatgatgaatatagataaaacacca

SEQ ID NO: 903 - RNA, 152 nt, synthetic construct
  source 1..152: mol_type = other RNA
gtctgtatctatattcatcatgtttaagagctagaaatagcaagtttaaataaggctagtccgttatcagcgtgaaaacgcggcaccgagtcggtgcattaaagaaaatatcatctttggtgtttcctatgatgaatatagataaggaaaca

SEQ ID NO: 904 - RNA, 152 nt, synthetic construct
  source 1..152: mol_type = other RNA
gtctgtatctatattcatcatgtttaagagctagaaatagcaagtttaaataaggctagtccgttatcagcgtgaaaacgcggcaccgagtcggtgcattaaagaaaatatcatctttggtgtttcctatgatgaatatagataacaccaaa

SEQ ID NO: 905 - RNA, 152 nt, synthetic construct
  source 1..152: mol_type = other RNA
gtctgtatctatattcatcatgtttaagagctagaaatagcaagtttaaataaggctagtccgttatcagcgtgaaaacgcggcaccgagtcggtgcattaaagaaaatatcatctttggtgtttcctatgatgaatatagataaccaaaga

SEQ ID NO: 906 - RNA, 152 nt, synthetic construct
  source 1..152: mol_type = other RNA
tctgtatctatattcatcatgttttagagctagaaatagcaagttaaaataaggctagtccgttatcaacttgaaaaagtggcaccgagtcggtgcgccgggcaccatcaaagagaacatcatctttggtgttagctatgatgaatatagat

SEQ ID NO: 907 - RNA, 152 nt, synthetic construct
  source 1..152: mol_type = other RNA
tctgtatctatattcatcatgttttagagctagaaatagcaagttaaaataaggctagtccgttatcaacttgaaaaagtggcaccgagtcggtgcgcctggcaccatcaaagagaacatcatctttggtgttagctatgatgaatatagat

SEQ ID NO: 908 - RNA, 152 nt, synthetic construct
  source 1..152: mol_type = other RNA
tctgtatctatattcatcatgttttagagctagaaatagcaagttaaaataaggctagtccgttatcaacttgaaaaagtggcaccgagtcggtgcgcctggcaccatcaaagagaacatcatctttggtgtttcatatgatgaatatagat

SEQ ID NO: 909 - RNA, 152 nt, synthetic construct
  source 1..152: mol_type = other RNA
tctgtatctatattcatcatgttttagagctagaaatagcaagttaaaataaggctagtccgttatcaacttgaaaaagtggcaccgagtcggtgcgcctggcaccatcaaagagaacatcatctttggtgtttcgtatgatgaatatagat

SEQ ID NO: 910 - RNA, 152 nt, synthetic construct
  source 1..152: mol_type = other RNA
tctgtatctatattcatcatgttttagagctagaaatagcaagttaaaataaggctagtccgttatcaacttgaaaaagtggcaccgagtcggtgcgcctggcaccattaaagagaatatcatctttggtgttagctatgatgaatatagat

SEQ ID NO: 911 - RNA, 152 nt, synthetic construct
  source 1..152: mol_type = other RNA
tctgtatctatattcatcatgttttagagctagaaatagcaagttaaaataaggctagtccgttatcaacttgaaaaagtggcaccgagtcggtgcgcccgggacgatcaaagagaacatcatctttggcgtcagttacgatgaatatagat

SEQ ID NO: 912 - RNA, 152 nt, synthetic construct
  source 1..152: mol_type = other RNA
tctgtatctatattcatcatgttttagagctagaaatagcaagttaaaataaggctagtccgttatcaacttgaaaaagtggcaccgagtcggtgcgcccgggacgatcaaagagaacatcatctttggcgtctcctacgatgaatatagat

SEQ ID NO: 913 - RNA, 152 nt, synthetic construct
  source 1..152: mol_type = other RNA
tctgtatctatattcatcatgttttagagctagaaatagcaagttaaaataaggctagtccgttatcaacttgaaaaagtggcaccgagtcggtgcgcccgggacgatcaaggagaacatcatcttcggcgtctcctacgatgaatatagat

SEQ ID NO: 914 - RNA, 152 nt, synthetic construct
  source 1..152: mol_type = other RNA
tctgtatctatattcatcatgttttagagctagaaatagcaagttaaaataaggctagtccgttatcaacttgaaaaagtggcaccgagtcggtgcgccgggcaccattaaagaaaatatcatctttggtgttagctatgatgaatatagat

SEQ ID NO: 915 - RNA, 152 nt, synthetic construct
  source 1..152: mol_type = other RNA
tctgtatctatattcatcatgttttagagctagaaatagcaagttaaaataaggctagtccgttatcaacttgaaaaagtggcaccgagtcggtgcgccgggcaccattaaagaaaatatcatctttggtgtttcatatgatgaatatagat

SEQ ID NO: 916 - RNA, 152 nt, synthetic construct
  source 1..152: mol_type = other RNA
tctgtatctatattcatcatgttttagagctagaaatagcaagttaaaataaggctagtccgttatcaacttgaaaaagtggcaccgagtcggtgcgccgggcaccattaaagaaaatatcatctttggtgtttcgtatgatgaatatagat

SEQ ID NO: 917 - RNA, 152 nt, synthetic construct
  source 1..152: mol_type = other RNA
tctgtatctatattcatcatgttttagagctagaaatagcaagttaaaataaggctagtccgttatcaacttgaaaaagtggcaccgagtcggtgcgccgggcaccattaaagagaatatcatctttggtgtttcgtatgatgaatatagat

SEQ ID NO: 918 - RNA, 152 nt, synthetic construct
  source 1..152: mol_type = other RNA
tctgtatctatattcatcatgttttagagctagaaatagcaagttaaaataaggctagtccgttatcaacttgaaaaagtggcaccgagtcggtgcgcctggcaccatcaaagagaacatcatctttggtgtttcttatgatgaatatagat

SEQ ID NO: 919 - RNA, 152 nt, synthetic construct
  source 1..152: mol_type = other RNA
tctgtatctatattcatcatgttttagagctagaaatagcaagttaaaataaggctagtccgttatcaacttgaaaaagtggcaccgagtcggtgcgcctggcaccatcaaggagaacataatattcggcgtctcctacgatgaatatagat

SEQ ID NO: 920 - RNA, 152 nt, synthetic construct
  source 1..152: mol_type = other RNA
tctgtatctatattcatcatgttttagagctagaaatagcaagttaaaataaggctagtccgttatcaacttgaaaaagtggcaccgagtcggtgcgcctggcaccattaaagaaaatatcatctttggcgtcagttacgatgaatatagat

SEQ ID NO: 921 - RNA, 152 nt, synthetic construct
  source 1..152: mol_type = other RNA
tctgtatctatattcatcatgttttagagctagaaatagcaagttaaaataaggctagtccgttatcaacttgaaaaagtggcaccgagtcggtgcgcctggcaccattaaagaaaatatcatctttggtgttagctatgatgaatatagat

SEQ ID NO: 922 - RNA, 152 nt, synthetic construct
  source 1..152: mol_type = other RNA
tctgtatctatattcatcatgttttagagctagaaatagcaagttaaaataaggctagtccgttatcaacttgaaaaagtggcaccgagtcggtgcgcctggcaccattaaagaaaatatcatctttggtgttagttatgatgaatatagat

SEQ ID NO: 923 - RNA, 152 nt, synthetic construct
  source 1..152: mol_type = other RNA
tctgtatctatattcatcatgttttagagctagaaatagcaagttaaaataaggctagtccgttatcaacttgaaaaagtggcaccgagtcggtgcgcctggcaccattaaagaaaatatcatctttggtgtttcatatgatgaatatagat

SEQ ID NO: 924 - RNA, 152 nt, synthetic construct
  source 1..152: mol_type = other RNA
tctgtatctatattcatcatgttttagagctagaaatagcaagttaaaataaggctagtccgttatcaacttgaaaaagtggcaccgagtcggtgcgcctggcaccattaaagaaaatatcatctttggtgtttcgtatgatgaatatagat

SEQ ID NO: 925 - RNA, 152 nt, synthetic construct
  source 1..152: mol_type = other RNA
tctgtatctatattcatcatgttttagagctagaaatagcaagttaaaataaggctagtccgttatcaacttgaaaaagtggcaccgagtcggtgcgcctggtacaatcaaagagaacatcatctttggtgtttcatatgatgaatatagat

SEQ ID NO: 926 - RNA, 152 nt, synthetic construct
  source 1..152: mol_type = other RNA
tctgtatctatattcatcatgttttagagctagaaatagcaagttaaaataaggctagtccgttatcaacttgaaaaagtggcaccgagtcggtgcgcctggtacaatcaaggagaacatcatcttcggcgtctcctacgatgaatatagat

SEQ ID NO: 927 - RNA, 152 nt, synthetic construct
  source 1..152: mol_type = other RNA
tctgtatctatattcatcatgttttagagctagaaatagcaagttaaaataaggctagtccgttatcaacttgaaaaagtggcaccgagtcggtgcgccaggaacgattaaggagaacatcatctttggcgtgagctacgatgaatatagat

SEQ ID NO: 928 - RNA, 152 nt, synthetic construct
  source 1..152: mol_type = other RNA
tctgtatctatattcatcatgttttagagctagaaatagcaagttaaaataaggctagtccgttatcaacttgaaaaagtggcaccgagtcggtgcgccaggcactattaaagagaacatcatctttggagtgtcgtacgatgaatatagat

SEQ ID NO: 929 - RNA, 152 nt, synthetic construct
  source 1..152: mol_type = other RNA
tctgtatctatattcatcatgttttagagctagaaatagcaagttaaaataaggctagtccgttatcaacttgaaaaagtggcaccgagtcggtgcggcttgcaccatcaaggagaacatcatcttcggtgtttgatcatatgaatatagat

SEQ ID NO: 930 - RNA, 152 nt, synthetic construct
  source 1..152: mol_type = other RNA
tctgtatctatattcatcatgttttagagctagaaatagcaagttaaaataaggctagtccgttatcaacttgaaaaagtggcaccgagtcggtgcggcttgcaccattaaagaaaatatcatctttggtgtttgatcatatgaatatagat

SEQ ID NO: 931 - RNA, 152 nt, synthetic construct
  source 1..152: mol_type = other RNA
tctgtatctatattcatcatgttttagagctagaaatagcaagttaaaataaggctagtccgttatcaacttgaaaaagtggcaccgagtcggtgcggctggcaccattaaagaaaatatcatctttggtgtttcctcatatgaatatagat

SEQ ID NO: 932 - RNA, 152 nt, synthetic construct
  source 1..152: mol_type = other RNA
tctgtatctatattcatcatgttttagagctagaaatagcaagttaaaataaggctagtccgttatcaacttgaaaaagtggcaccgagtcggtgcggctggcaccatcaaggagaacatcatcttcggtgtttcctcatatgaatatagat

SEQ ID NO: 933 - RNA, 154 nt, synthetic construct
  source 1..154: mol_type = other RNA
gttcatcataggaaacaccaagttttagagctagaaatagcaagttaaaataaggctagtccgttatcaacttgaaaaagtggcaccgagtcggtgcaagaaaatatcatctttggtgtttcctatttcaatcgggtctctacgtgggggcccg

SEQ ID NO: 934 - RNA, 154 nt, synthetic construct
  source 1..154: mol_type = other RNA
gttcatcataggaaacaccaagttttagagctagaaatagcaagttaaaataaggctagtccgttatcaacttgaaaaagtggcaccgagtcggtgcaagaaaatatcatctttggtgtttcctatttcattcgggtctctacgtgggggcccg

SEQ ID NO: 935 - RNA, 154 nt, synthetic construct
  source 1..154: mol_type = other RNA
gtctgtatctatattcatcatgtttaagagctagaaatagcaagtttaaataaggctagtccgttatcagcgtgaaaacgcggcaccgagtcggtgcattaaagaaaatatcatctttggtgtttcctatgatgaatatagataagtgcaccaa

SEQ ID NO: 936 - RNA, 154 nt, synthetic construct
  source 1..154: mol_type = other RNA
gtctgtatctatattcatcatgtttaagagctagaaatagcaagtttaaataaggctagtccgttatcagcgtgaaaacgcggcaccgagtcggtgcattaaagaaaatatcatctttggtgtttcctatgatgaatatagataaaacgatgat

SEQ ID NO: 937 - RNA, 154 nt, synthetic construct
  source 1..154: mol_type = other RNA
gtctgtatctatattcatcatgtttaagagctagaaatagcaagtttaaataaggctagtccgttatcagcgtgaaaacgcggcaccgagtcggtgcattaaagaaaatatcatctttggtgtttcctatgatgaatatagataaacctttaat

SEQ ID NO: 938 - RNA, 154 nt, synthetic construct
  source 1..154: mol_type = other RNA
gtctgtatctatattcatcatgtttaagagctagaaatagcaagtttaaataaggctagtccgttatcagcgtgaaaacgcggcaccgagtcggtgcattaaagaaaatatcatctttggtgtttcctatgatgaatatagataaaaaaagatg

SEQ ID NO: 939 - RNA, 154 nt, synthetic construct
  source 1..154: mol_type = other RNA
gtctgtatctatattcatcatgtttaagagctagaaatagcaagtttaaataaggctagtccgttatcagcgtgaaaacgcggcaccgagtcggtgcattaaagaaaatatcatctttggtgtttcctatgatgaatatagataaaaattttct

SEQ ID NO: 940 - RNA, 154 nt, synthetic construct
  source 1..154: mol_type = other RNA
gttcatcataggaaacaccaagtttaagagcggggaaatccgcaagtttaaataaggctagtccgttatcagcgtgaaaacgcggcaccgagtcggtgcatcatctttggtgtttcccgcggttctatctagttacgcgttaaaccaactagaa

SEQ ID NO: 941 - RNA, 155 nt, synthetic construct
  source 1..155: mol_type = other RNA
gttcatcataggaaacaccaagtttaagagcggggaaatccgcaagtttaaataaggctagtccgttatcagcgtgaaaacgcggcaccgagtcggtgcatcatctttggtgtttcctcgcggttctatctagttacgcgttaaaccaactagaa

SEQ ID NO: 942 - RNA, 155 nt, synthetic construct
  source 1..155: mol_type = other RNA
gttcatcataggaaacaccaagtttaagagcggggaaatccgcaagtttaaataaggctagtccgttatcagcgtgaaaacgcggcaccgagtcggtgctatcatctttggtgtttcccgcggttctatctagttacgcgttaaaccaactagaa

SEQ ID NO: 943 - RNA, 156 nt, synthetic construct
  source 1..156: mol_type = other RNA
gttcatcataggaaacaccaagttttagagctagaaatagcaagttaaaataaggctagtccgttatcaacttgaaaaagtggcaccgagtcggtgcaagaaaatatcatctttggtgtttcctatttcaagctcgggtctctacgtgggggcccg

SEQ ID NO: 944 - RNA, 156 nt, synthetic construct
  source 1..156: mol_type = other RNA
gttcatcataggaaacaccaagttttagagctagaaatagcaagttaaaataaggctagtccgttatcaacttgaaaaagtggcaccgagtcggtgcaagaaaatatcatctttggtgtttcctatagactgctcgggtctctacgtgggggcccg

SEQ ID NO: 945 - RNA, 156 nt, synthetic construct
  source 1..156: mol_type = other RNA
gtctgtatctatattcatcatgtttaagagctagaaatagcaagtttaaataaggctagtccgttatcagcgtgaaaacgcggcaccgagtcggtgcattaaagaaaatatcatctttggtgtttcctatgatgaatatagataagtaaaaaagat

SEQ ID NO: 946 - RNA, 156 nt, synthetic construct
  source 1..156: mol_type = other RNA
gtctgtatctatattcatcatgtttaagagctagaaatagcaagtttaaataaggctagtccgttatcagcgtgaaaacgcggcaccgagtcggtgcattaaagaaaatatcatctttggtgtttcctatgatgaatatagataactgggtcttta

SEQ ID NO: 947 - RNA, 156 nt, synthetic construct
  source 1..156: mol_type = other RNA
gtctgtatctatattcatcatgtttaagagctagaaatagcaagtttaaataaggctagtccgttatcagcgtgaaaacgcggcaccgagtcggtgcattaaagaaaatatcatctttggtgtttcctatgatgaatatagataaggaaatatttt

SEQ ID NO: 948 - RNA, 156 nt, synthetic construct
  source 1..156: mol_type = other RNA
gtctgtatctatattcatcatgtttaagagctagaaatagcaagtttaaataaggctagtccgttatcagcgtgaaaacgcggcaccgagtcggtgcattaaagaaaatatcatctttggtgtttcctatgatgaatatagataaatggagatatt

SEQ ID NO: 949 - RNA, 156 nt, synthetic construct
  source 1..156: mol_type = other RNA
gtctgtatctatattcatcatgtttaagagctagaaatagcaagtttaaataaggctagtccgttatcagcgtgaaaacgcggcaccgagtcggtgcattaaagaaaatatcatctttggtgtttcctatgatgaatatagataaacttggaaaca

SEQ ID NO: 950 - RNA, 156 nt, synthetic construct
  source 1..156: mol_type = other RNA
gtctgtatctatattcatcatgtttaagagctagaaatagcaagtttaaataaggctagtccgttatcagcgtgaaaacgcggcaccgagtcggtgcattaaagaaaatatcatctttggtgtttcctatgatgaatatagatagttgatgatgat

SEQ ID NO: 951 - RNA, 156 nt, synthetic construct
  source 1..156: mol_type = other RNA
gtctgtatctatattcatcatgtttaagagctagaaatagcaagtttaaataaggctagtccgttatcagcgtgaaaacgcggcaccgagtcggtgcattaaagaaaatatcatctttggtgtttcctatgatgaatatagatatatgagatattt

SEQ ID NO: 952 - RNA, 156 nt, synthetic construct
  source 1..156: mol_type = other RNA
gtctgtatctatattcatcatgtttaagagctagaaatagcaagtttaaataaggctagtccgttatcagcgtgaaaacgcggcaccgagtcggtgcattaaagaaaatatcatctttggtgtttcctatgatgaatatagataccaaagtttctt

SEQ ID NO: 953 - RNA, 156 nt, synthetic construct
  source 1..156: mol_type = other RNA
gtctgtatctatattcatcatgtttaagagctagaaatagcaagtttaaataaggctagtccgttatcagcgtgaaaacgcggcaccgagtcggtgcattaaagaaaatatcatctttggtgtttcctatgatgaatatagataaacttgaaacac

SEQ ID NO: 954 - RNA, 156 nt, synthetic construct
  source 1..156: mol_type = other RNA
gtctgtatctatattcatcatgtttaagagctagaaatagcaagtttaaataaggctagtccgttatcagcgtgaaaacgcggcaccgagtcggtgcattaaagaaaatatcatctttggtgtttcctatgatgaatatagataaaaaaattttct

SEQ ID NO: 955 - RNA, 156 nt, synthetic construct
  source 1..156: mol_type = other RNA
gtctgtatctatattcatcatgtttaagagctagaaatagcaagtttaaataaggctagtccgttatcagcgtgaaaacgcggcaccgagtcggtgcattaaagaaaatatcatctttggtgtttcctatgatgaatatagataccgaggattttc

SEQ ID NO: 956 - RNA, 156 nt, synthetic construct
  source 1..156: mol_type = other RNA
gtctgtatctatattcatcatgtttaagagctagaaatagcaagtttaaataaggctagtccgttatcagcgtgaaaacgcggcaccgagtcggtgcattaaagaaaatatcatctttggtgtttcctatgatgaatatagataaggtgaaccaaa

SEQ ID NO: 957 - RNA, 156 nt, synthetic construct
  source 1..156: mol_type = other RNA
gtctgtatctatattcatcatgtttaagagctagaaatagcaagtttaaataaggctagtccgttatcagcgtgaaaacgcggcaccgagtcggtgcattaaagaaaatatcatctttggtgtttcctatgatgaatatagataccaacgtgatat

SEQ ID NO: 958 - RNA, 156 nt, synthetic construct
  source 1..156: mol_type = other RNA
gtctgtatctatattcatcatgtttaagagctagaaatagcaagtttaaataaggctagtccgttatcagcgtgaaaacgcggcaccgagtcggtgcattaaagaaaatatcatctttggtgtttcctatgatgaatatagataagtaaccaaaga

SEQ ID NO: 959 - RNA, 156 nt, synthetic construct
  source 1..156: mol_type = other RNA
gtctgtatctatattcatcatgtttaagagctagaaatagcaagtttaaataaggctagtccgttatcagcgtgaaaacgcggcaccgagtcggtgcattaaagaaaatatcatctttggtgtttcctatgatgaatatagataaggagacaaaga

SEQ ID NO: 960 - RNA, 156 nt, synthetic construct
  source 1..156: mol_type = other RNA
gtctgtatctatattcatcatgtttaagagctagaaatagcaagtttaaataaggctagtccgttatcagcgtgaaaacgcggcaccgagtcggtgcattaaagaaaatatcatctttggtgtttcctatgatgaatatagataacttggaaacac

SEQ ID NO: 961 - RNA, 156 nt, synthetic construct
  source 1..156: mol_type = other RNA
gtctgtatctatattcatcatgtttaagagctagaaatagcaagtttaaataaggctagtccgttatcagcgtgaaaacgcggcaccgagtcggtgcattaaagaaaatatcatctttggtgtttcctatgatgaatatagataaaactattttct

SEQ ID NO: 962 - RNA, 156 nt, synthetic construct
  source 1..156: mol_type = other RNA
gtctgtatctatattcatcatgtttaagagctagaaatagcaagtttaaataaggctagtccgttatcagcgtgaaaacgcggcaccgagtcggtgcattaaagaaaatatcatctttggtgtttcctatgatgaatatagataaggagatttaat

SEQ ID NO: 963 - RNA, 156 nt, synthetic construct
  source 1..156: mol_type = other RNA
gtctgtatctatattcatcatgtttaagagctagaaatagcaagtttaaataaggctagtccgttatcagcgtgaaaacgcggcaccgagtcggtgcattaaagaaaatatcatctttggtgtttcctatgatgaatatagatattgaggtatttt

SEQ ID NO: 964 - RNA, 156 nt, synthetic construct
  source 1..156: mol_type = other RNA
gtctgtatctatattcatcatgtttaagagctagaaatagcaagtttaaataaggctagtccgttatcagcgtgaaaacgcggcaccgagtcggtgcattaaagaaaatatcatctttggtgtttcctatgatgaatatagataaccgtttcttta

SEQ ID NO: 965 - RNA, 156 nt, synthetic construct
  source 1..156: mol_type = other RNA
gtctgtatctatattcatcatgtttaagagctagaaatagcaagtttaaataaggctagtccgttatcagcgtgaaaacgcggcaccgagtcggtgcattaaagaaaatatcatctttggtgtttcctatgatgaatatagataccaaagttcttt

SEQ ID NO: 966 - RNA, 156 nt, synthetic construct
  source 1..156: mol_type = other RNA
gtctgtatctatattcatcatgtttaagagctagaaatagcaagtttaaataaggctagtccgttatcagcgtgaaaacgcggcaccgagtcggtgcattaaagaaaatatcatctttggtgtttcctatgatgaatatagatactggagacacca

SEQ ID NO: 967 - RNA, 156 nt, synthetic construct
  source 1..156: mol_type = other RNA
gtctgtatctatattcatcatgtttaagagctagaaatagcaagtttaaataaggctagtccgttatcagcgtgaaaacgcggcaccgagtcggtgcattaaagaaaatatcatctttggtgtttcctatgatgaatatagataccaactgatgat

SEQ ID NO: 968 - RNA, 156 nt, synthetic construct
  source 1..156: mol_type = other RNA
gtctgtatctatattcatcatgtttaagagctagaaatagcaagtttaaataaggctagtccgttatcagcgtgaaaacgcggcaccgagtcggtgcattaaagaaaatatcatctttggtgtttcctatgatgaatatagataaaaatctttaat

SEQ ID NO: 969 - RNA, 156 nt, synthetic construct
  source 1..156: mol_type = other RNA
gtctgtatctatattcatcatgtttaagagctagaaatagcaagtttaaataaggctagtccgttatcagcgtgaaaacgcggcaccgagtcggtgcattaaagaaaatatcatctttggtgtttcctatgatgaatatagataagtggaatgata

SEQ ID NO: 970 - RNA, 156 nt, synthetic construct
  source 1..156: mol_type = other RNA
gtctgtatctatattcatcatgtttaagagctagaaatagcaagtttaaataaggctagtccgttatcagcgtgaaaacgcggcaccgagtcggtgcattaaagaaaatatcatctttggtgtttcctatgatgaatatagatatggaaaaagatg

SEQ ID NO: 971 - RNA, 156 nt, synthetic construct
  source 1..156: mol_type = other RNA
gtctgtatctatattcatcatgtttaagagctagaaatagcaagtttaaataaggctagtccgttatcagcgtgaaaacgcggcaccgagtcggtgcattaaagaaaatatcatctttggtgtttcctatgatgaatatagatatggaagttcttt

SEQ ID NO: 972 - RNA, 156 nt, synthetic construct
  source 1..156: mol_type = other RNA
gtctgtatctatattcatcatgtttaagagctagaaatagcaagtttaaataaggctagtccgttatcagcgtgaaaacgcggcaccgagtcggtgcattaaagaaaatatcatctttggtgtttcctatgatgaatatagataccgtcgcaaaga

SEQ ID NO: 973 - RNA, 156 nt, synthetic construct
  source 1..156: mol_type = other RNA
gtctgtatctatattcatcatgtttaagagctagaaatagcaagtttaaataaggctagtccgttatcagcgtgaaaacgcggcaccgagtcggtgcattaaagaaaatatcatctttggtgtttcctatgatgaatatagataaaagggaaagat

SEQ ID NO: 974 - RNA, 156 nt, synthetic construct
  source 1..156: mol_type = other RNA
gtctgtatctatattcatcatgtttaagagctagaaatagcaagtttaaataaggctagtccgttatcagcgtgaaaacgcggcaccgagtcggtgcattaaagaaaatatcatctttggtgtttcctatgatgaatatagataattgtaatgata

SEQ ID NO: 975 - RNA, 156 nt, synthetic construct
  source 1..156: mol_type = other RNA
gtctgtatctatattcatcatgtttaagagctagaaatagcaagtttaaataaggctagtccgttatcagcgtgaaaacgcggcaccgagtcggtgcattaaagaaaatatcatctttggtgtttcctatgatgaatatagataaaagttcatagg

SEQ ID NO: 976 - RNA, 156 nt, synthetic construct
  source 1..156: mol_type = other RNA
gtctgtatctatattcatcatgtttaagagctagaaatagcaagtttaaataaggctagtccgttatcagcgtgaaaacgcggcaccgagtcggtgcattaaagaaaatatcatctttggtgtttcctatgatgaatatagatagcgggaattttc

SEQ ID NO: 977 - RNA, 156 nt, synthetic construct
  source 1..156: mol_type = other RNA
gtctgtatctatattcatcatgtttaagagctagaaatagcaagtttaaataaggctagtccgttatcagcgtgaaaacgcggcaccgagtcggtgcattaaagaaaatatcatctttggtgtttcctatgatgaatatagatagaccgccatagg

SEQ ID NO: 978 - RNA, 156 nt, synthetic construct
  source 1..156: mol_type = other RNA
gtctgtatctatattcatcatgtttaagagctagaaatagcaagtttaaataaggctagtccgttatcagcgtgaaaacgcggcaccgagtcggtgcattaaagaaaatatcatctttggtgtttcctatgatgaatatagataaagggaaagatg

SEQ ID NO: 979 - RNA, 156 nt, synthetic construct
  source 1..156: mol_type = other RNA
gtctgtatctatattcatcatgtttaagagctagaaatagcaagtttaaataaggctagtccgttatcagcgtgaaaacgcggcaccgagtcggtgcattaaagaaaatatcatctttggtgtttcctatgatgaatatagataaaaaatattttc

SEQ ID NO: 980 - RNA, 156 nt, synthetic construct
  source 1..156: mol_type = other RNA
gtctgtatctatattcatcatgtttaagagctagaaatagcaagtttaaataaggctagtccgttatcagcgtgaaaacgcggcaccgagtcggtgcattaaagaaaatatcatctttggtgtttcctatgatgaatatagataaaaaggaaagat

SEQ ID NO: 981 - RNA, 156 nt, synthetic construct
  source 1..156: mol_type = other RNA
gtctgtatctatattcatcatgtttaagagctagaaatagcaagtttaaataaggctagtccgttatcagcgtgaaaacgcggcaccgagtcggtgcattaaagaaaatatcatctttggtgtttcctatgatgaatatagataaaacccatagga

SEQ ID NO: 982 - RNA, 156 nt, synthetic construct
  source 1..156: mol_type = other RNA
gtctgtatctatattcatcatgtttaagagctagaaatagcaagtttaaataaggctagtccgttatcagcgtgaaaacgcggcaccgagtcggtgcattaaagaaaatatcatctttggtgtttcctatgatgaatatagataattagcgatatt

SEQ ID NO: 983 - RNA, 156 nt, synthetic construct
  source 1..156: mol_type = other RNA
gtctgtatctatattcatcatgtttaagagctagaaatagcaagtttaaataaggctagtccgttatcagcgtgaaaacgcggcaccgagtcggtgcattaaagaaaatatcatctttggtgtttcctatgatgaatatagataccgaattaggaa

SEQ ID NO: 984 - RNA, 156 nt, synthetic construct
  source 1..156: mol_type = other RNA
gtctgtatctatattcatcatgtttaagagctagaaatagcaagtttaaataaggctagtccgttatcagcgtgaaaacgcggcaccgagtcggtgcattaaagaaaatatcatctttggtgtttcctatgatgaatatagataaggagacatagg

SEQ ID NO: 985 - RNA, 156 nt, synthetic construct
  source 1..156: mol_type = other RNA
gttcatcataggaaacaccaagtttaagagcggggaaatccgcaagtttaaataaggctagtccgttatcagcgtgaaaacgcggcaccgagtcggtgcatcatctttggtgtttcctacgcggttctatctagttacgcgttaaaccaactagaa

SEQ ID NO: 986 - RNA, 156 nt, synthetic construct
  source 1..156: mol_type = other RNA
gttcatcataggaaacaccaagtttaagagcggggaaatccgcaagtttaaataaggctagtccgttatcagcgtgaaaacgcggcaccgagtcggtgctatcatctttggtgtttcctcgcggttctatctagttacgcgttaaaccaactagaa

SEQ ID NO: 987 - RNA, 156 nt, synthetic construct
  source 1..156: mol_type = other RNA
gttcatcataggaaacaccaagtttaagagcggggaaatccgcaagtttaaataaggctagtccgttatcagcgtgaaaacgcggcaccgagtcggtgcatatcatctttggtgtttcccgcggttctatctagttacgcgttaaaccaactagaa

SEQ ID NO: 988 - RNA, 157 nt, synthetic construct
  source 1..157: mol_type = other RNA
gaccattaaagaaaatatcatgtttaagagctagaaatagcaagtttaaataaggctagtccgttatcagcgtgaaaacgcggcaccgagtcggtgcaccaaagatgatattttcaaagccgcggttctatctagttacgcgttaaaccaactagaa

SEQ ID NO: 989 - RNA, 157 nt, synthetic construct
  source 1..157: mol_type = other RNA
gttcatcataggaaacaccaagtttaagagcggggaaatccgcaagtttaaataaggctagtccgttatcagcgtgaaaacgcggcaccgagtcggtgcatcatctttggtgtttcctatcgcggttctatctagttacgcgttaaaccaactagaa

SEQ ID NO: 990 - RNA, 157 nt, synthetic construct
  source 1..157: mol_type = other RNA
gttcatcataggaaacaccaagtttaagagcggggaaatccgcaagtttaaataaggctagtccgttatcagcgtgaaaacgcggcaccgagtcggtgctatcatctttggtgtttcctacgcggttctatctagttacgcgttaaaccaactagaa

SEQ ID NO: 991 - RNA, 157 nt, synthetic construct
  source 1..157: mol_type = other RNA
gttcatcataggaaacaccaagtttaagagcggggaaatccgcaagtttaaataaggctagtccgttatcagcgtgaaaacgcggcaccgagtcggtgcatatcatctttggtgtttcctcgcggttctatctagttacgcgttaaaccaactagaa

SEQ ID NO: 992 - RNA, 157 nt, synthetic construct
  source 1..157: mol_type = other RNA
gttcatcataggaaacaccaagtttaagagcggggaaatccgcaagtttaaataaggctagtccgttatcagcgtgaaaacgcggcaccgagtcggtgcaatatcatctttggtgtttcccgcggttctatctagttacgcgttaaaccaactagaa

SEQ ID NO: 993 - RNA, 158 nt, synthetic construct
  source 1..158: mol_type = other RNA
gttcatcataggaaacaccaagttttagagctagaaatagcaagttaaaataaggctagtccgttatcaacttgaaaaagtggcaccgagtcggtgcattaaagaaaatatcatctttggtgtttcctatttcaatcgggtctctacgtgggggcccg

SEQ ID NO: 994 - RNA, 158 nt, synthetic construct
  source 1..158: mol_type = other RNA
gttcatcataggaaacaccaagttttagagctagaaatagcaagttaaaataaggctagtccgttatcaacttgaaaaagtggcaccgagtcggtgcattaaagaaaatatcatctttggtgtttcctatttcattcgggtctctacgtgggggcccg

SEQ ID NO: 995 - RNA, 158 nt, synthetic construct
  source 1..158: mol_type = other RNA
gtctgtatctatattcatcatgtttaagagctagaaatagcaagtttaaataaggctagtccgttatcagcgtgaaaacgcggcaccgagtcggtgcattaaagaaaatatcatctttggtgtttcctatgatgaatatagataaggaagaaagatga

SEQ ID NO: 996 - RNA, 158 nt, synthetic construct
  source 1..158: mol_type = other RNA
gtctgtatctatattcatcatgtttaagagctagaaatagcaagtttaaataaggctagtccgttatcagcgtgaaaacgcggcaccgagtcggtgcattaaagaaaatatcatctttggtgtttcctatgatgaatatagataccaaagttttcttt

SEQ ID NO: 997 - RNA, 158 nt, synthetic construct
  source 1..158: mol_type = other RNA
gtctgtatctatattcatcatgtttaagagctagaaatagcaagtttaaataaggctagtccgttatcagcgtgaaaacgcggcaccgagtcggtgcattaaagaaaatatcatctttggtgtttcctatgatgaatatagataaacctggaaacacc

SEQ ID NO: 998 - RNA, 158 nt, synthetic construct
  source 1..158: mol_type = other RNA
gtctgtatctatattcatcatgtttaagagctagaaatagcaagtttaaataaggctagtccgttatcagcgtgaaaacgcggcaccgagtcggtgcattaaagaaaatatcatctttggtgtttcctatgatgaatatagatatgttttccaaagat

SEQ ID NO: 999 - RNA, 158 nt, synthetic construct
  source 1..158: mol_type = other RNA
gtctgtatctatattcatcatgtttaagagctagaaatagcaagtttaaataaggctagtccgttatcagcgtgaaaacgcggcaccgagtcggtgcattaaagaaaatatcatctttggtgtttcctatgatgaatatagataaaaaaatattttct

SEQ ID NO: 1000 - RNA, 158 nt, synthetic construct
  source 1..158: mol_type = other RNA
gtctgtatctatattcatcatgtttaagagctagaaatagcaagtttaaataaggctagtccgttatcagcgtgaaaacgcggcaccgagtcggtgcattaaagaaaatatcatctttggtgtttcctatgatgaatatagatacatgggtattttct

SEQ ID NO: 1001 - RNA, 158 nt, synthetic construct
  source 1..158: mol_type = other RNA
gtctgtatctatattcatcatgtttaagagctagaaatagcaagtttaaataaggctagtccgttatcagcgtgaaaacgcggcaccgagtcggtgcattaaagaaaatatcatctttggtgtttcctatgatgaatatagatacggggattttcttt

SEQ ID NO: 1002 - RNA, 158 nt, synthetic construct
  source 1..158: mol_type = other RNA
gtctgtatctatattcatcatgtttaagagctagaaatagcaagtttaaataaggctagtccgttatcagcgtgaaaacgcggcaccgagtcggtgcattaaagaaaatatcatctttggtgtttcctatgatgaatatagatagttgataagatgat

SEQ ID NO: 1003 - RNA, 158 nt, synthetic construct
  source 1..158: mol_type = other RNA
gtctgtatctatattcatcatgtttaagagctagaaatagcaagtttaaataaggctagtccgttatcagcgtgaaaacgcggcaccgagtcggtgcattaaagaaaatatcatctttggtgtttcctatgatgaatatagataaggagacaccaaag

SEQ ID NO: 1004 - RNA, 158 nt, synthetic construct
  source 1..158: mol_type = other RNA
gtctgtatctatattcatcatgtttaagagctagaaatagcaagtttaaataaggctagtccgttatcagcgtgaaaacgcggcaccgagtcggtgcattaaagaaaatatcatctttggtgtttcctatgatgaatatagatactaaagataggaaa

SEQ ID NO: 1005 - RNA, 158 nt, synthetic construct
  source 1..158: mol_type = other RNA
gtctgtatctatattcatcatgtttaagagctagaaatagcaagtttaaataaggctagtccgttatcagcgtgaaaacgcggcaccgagtcggtgcattaaagaaaatatcatctttggtgtttcctatgatgaatatagatagtctttccaaagat

SEQ ID NO: 1006 - RNA, 158 nt, synthetic construct
  source 1..158: mol_type = other RNA
gtctgtatctatattcatcatgtttaagagctagaaatagcaagtttaaataaggctagtccgttatcagcgtgaaaacgcggcaccgagtcggtgcattaaagaaaatatcatctttggtgtttcctatgatgaatatagataccagagtattttct

SEQ ID NO: 1007 - RNA, 158 nt, synthetic construct
  source 1..158: mol_type = other RNA
gtctgtatctatattcatcatgtttaagagctagaaatagcaagtttaaataaggctagtccgttatcagcgtgaaaacgcggcaccgagtcggtgcattaaagaaaatatcatctttggtgtttcctatgatgaatatagatacgggaaattttctt

SEQ ID NO: 1008 - RNA, 158 nt, synthetic construct
  source 1..158: mol_type = other RNA
gtctgtatctatattcatcatgtttaagagctagaaatagcaagtttaaataaggctagtccgttatcagcgtgaaaacgcggcaccgagtcggtgcattaaagaaaatatcatctttggtgtttcctatgatgaatatagataccaaagataggaaa

SEQ ID NO: 1009 - RNA, 158 nt, synthetic construct
  source 1..158: mol_type = other RNA
gtctgtatctatattcatcatgtttaagagctagaaatagcaagtttaaataaggctagtccgttatcagcgtgaaaacgcggcaccgagtcggtgcattaaagaaaatatcatctttggtgtttcctatgatgaatatagataaaaacgttttcttt

SEQ ID NO: 1010 - RNA, 158 nt, synthetic construct
  source 1..158: mol_type = other RNA
gtctgtatctatattcatcatgtttaagagctagaaatagcaagtttaaataaggctagtccgttatcagcgtgaaaacgcggcaccgagtcggtgcattaaagaaaatatcatctttggtgtttcctatgatgaatatagatacctggaaacaccaa

SEQ ID NO: 1011 - RNA, 158 nt, synthetic construct
  source 1..158: mol_type = other RNA
gtctgtatctatattcatcatgtttaagagctagaaatagcaagtttaaataaggctagtccgttatcagcgtgaaaacgcggcaccgagtcggtgcattaaagaaaatatcatctttggtgtttcctatgatgaatatagataacttggaaacacca

SEQ ID NO: 1012 - RNA, 158 nt, synthetic construct
  source 1..158: mol_type = other RNA
gtctgtatctatattcatcatgtttaagagctagaaatagcaagtttaaataaggctagtccgttatcagcgtgaaaacgcggcaccgagtcggtgcattaaagaaaatatcatctttggtgtttcctatgatgaatatagataaaactttaggaaac

SEQ ID NO: 1013 - RNA, 158 nt, synthetic construct
  source 1..158: mol_type = other RNA
gtctgtatctatattcatcatgtttaagagctagaaatagcaagtttaaataaggctagtccgttatcagcgtgaaaacgcggcaccgagtcggtgcattaaagaaaatatcatctttggtgtttcctatgatgaatatagataaggaagccaaagat

SEQ ID NO: 1014 - RNA, 158 nt, synthetic construct
  source 1..158: mol_type = other RNA
gtctgtatctatattcatcatgtttaagagctagaaatagcaagtttaaataaggctagtccgttatcagcgtgaaaacgcggcaccgagtcggtgcattaaagaaaatatcatctttggtgtttcctatgatgaatatagatacctggaaccaaaga

SEQ ID NO: 1015 - RNA, 158 nt, synthetic construct
  source 1..158: mol_type = other RNA
gtctgtatctatattcatcatgtttaagagctagaaatagcaagtttaaataaggctagtccgttatcagcgtgaaaacgcggcaccgagtcggtgcattaaagaaaatatcatctttggtgtttcctatgatgaatatagataacgccctaggaaac

SEQ ID NO: 1016 - RNA, 158 nt, synthetic construct
  source 1..158: mol_type = other RNA
gtctgtatctatattcatcatgtttaagagctagaaatagcaagtttaaataaggctagtccgttatcagcgtgaaaacgcggcaccgagtcggtgcattaaagaaaatatcatctttggtgtttcctatgatgaatatagatatttattagatgata

SEQ ID NO: 1017 - RNA, 158 nt, synthetic construct
  source 1..158: mol_type = other RNA
gtctgtatctatattcatcatgtttaagagctagaaatagcaagtttaaataaggctagtccgttatcagcgtgaaaacgcggcaccgagtcggtgcattaaagaaaatatcatctttggtgtttcctatgatgaatatagatagcccccggaaacac

SEQ ID NO: 1018 - RNA, 158 nt, synthetic construct
  source 1..158: mol_type = other RNA
gtctgtatctatattcatcatgtttaagagctagaaatagcaagtttaaataaggctagtccgttatcagcgtgaaaacgcggcaccgagtcggtgcattaaagaaaatatcatctttggtgtttcctatgatgaatatagatatggaagttctttaa

SEQ ID NO: 1019 - RNA, 158 nt, synthetic construct
  source 1..158: mol_type = other RNA
gtctgtatctatattcatcatgtttaagagctagaaatagcaagtttaaataaggctagtccgttatcagcgtgaaaacgcggcaccgagtcggtgcattaaagaaaatatcatctttggtgtttcctatgatgaatatagatacaggtgtttcttta

SEQ ID NO: 1020 - RNA, 158 nt, synthetic construct
  source 1..158: mol_type = other RNA
gtctgtatctatattcatcatgtttaagagctagaaatagcaagtttaaataaggctagtccgttatcagcgtgaaaacgcggcaccgagtcggtgcattaaagaaaatatcatctttggtgtttcctatgatgaatatagataaccccgaaacacca

SEQ ID NO: 1021 - RNA, 158 nt, synthetic construct
  source 1..158: mol_type = other RNA
gtctgtatctatattcatcatgtttaagagctagaaatagcaagtttaaataaggctagtccgttatcagcgtgaaaacgcggcaccgagtcggtgcattaaagaaaatatcatctttggtgtttcctatgatgaatatagataaccctaaggaaaca

SEQ ID NO: 1022 - RNA, 158 nt, synthetic construct
  source 1..158: mol_type = other RNA
gtctgtatctatattcatcatgtttaagagctagaaatagcaagtttaaataaggctagtccgttatcagcgtgaaaacgcggcaccgagtcggtgcattaaagaaaatatcatctttggtgtttcctatgatgaatatagatatgtaggatattttc

SEQ ID NO: 1023 - RNA, 158 nt, synthetic construct
  source 1..158: mol_type = other RNA
gtctgtatctatattcatcatgtttaagagctagaaatagcaagtttaaataaggctagtccgttatcagcgtgaaaacgcggcaccgagtcggtgcattaaagaaaatatcatctttggtgtttcctatgatgaatatagatatgttttcaaagatg

SEQ ID NO: 1024 - RNA, 158 nt, synthetic construct
  source 1..158: mol_type = other RNA
gtctgtatctatattcatcatgtttaagagctagaaatagcaagtttaaataaggctagtccgttatcagcgtgaaaacgcggcaccgagtcggtgcattaaagaaaatatcatctttggtgtttcctatgatgaatatagataaggagacataggaa

SEQ ID NO: 1025 - RNA, 158 nt, synthetic construct
  source 1..158: mol_type = other RNA
gtctgtatctatattcatcatgtttaagagctagaaatagcaagtttaaataaggctagtccgttatcagcgtgaaaacgcggcaccgagtcggtgcattaaagaaaatatcatctttggtgtttcctatgatgaatatagataccaacggatatttt

SEQ ID NO: 1026 - RNA, 158 nt, synthetic construct
  source 1..158: mol_type = other RNA
gtctgtatctatattcatcatgtttaagagctagaaatagcaagtttaaataaggctagtccgttatcagcgtgaaaacgcggcaccgagtcggtgcattaaagaaaatatcatctttggtgtttcctatgatgaatatagatatttctaaaacacca

SEQ ID NO: 1027 - RNA, 158 nt, synthetic construct
  source 1..158: mol_type = other RNA
gttcatcataggaaacaccaagtttaagagcggggaaatccgcaagtttaaataaggctagtccgttatcagcgtgaaaacgcggcaccgagtcggtgcatcatctttggtgtttcctatgcgcggttctatctagttacgcgttaaaccaactagaa

SEQ ID NO: 1028 - RNA, 158 nt, synthetic construct
  source 1..158: mol_type = other RNA
gttcatcataggaaacaccaagtttaagagcggggaaatccgcaagtttaaataaggctagtccgttatcagcgtgaaaacgcggcaccgagtcggtgctatcatctttggtgtttcctatcgcggttctatctagttacgcgttaaaccaactagaa

SEQ ID NO: 1029 - RNA, 158 nt, synthetic construct
  source 1..158: mol_type = other RNA
gttcatcataggaaacaccaagtttaagagcggggaaatccgcaagtttaaataaggctagtccgttatcagcgtgaaaacgcggcaccgagtcggtgcatatcatctttggtgtttcctacgcggttctatctagttacgcgttaaaccaactagaa

SEQ ID NO: 1030 - RNA, 158 nt, synthetic construct
  source 1..158: mol_type = other RNA
gttcatcataggaaacaccaagtttaagagcggggaaatccgcaagtttaaataaggctagtccgttatcagcgtgaaaacgcggcaccgagtcggtgcaatatcatctttggtgtttcctcgcggttctatctagttacgcgttaaaccaactagaa

SEQ ID NO: 1031 - RNA, 158 nt, synthetic construct
  source 1..158: mol_type = other RNA
gttcatcataggaaacaccaagtttaagagcggggaaatccgcaagtttaaataaggctagtccgttatcagcgtgaaaacgcggcaccgagtcggtgcaaatatcatctttggtgtttcccgcggttctatctagttacgcgttaaaccaactagaa

SEQ ID NO: 1032 - RNA, 159 nt, synthetic construct
  source 1..159: mol_type = other RNA
gaccattaaagaaaatatcatgtttaagagctagaaatagcaagtttaaataaggctagtccgttatcagcgtgaaaacgcggcaccgagtcggtgcaccaaagatgatattttcttaagttcgcggttctatctagttacgcgttaaaccaactagaa

SEQ ID NO: 1033 - RNA, 159 nt, synthetic construct
  source 1..159: mol_type = other RNA
gttcatcataggaaacaccaagtttaagagcggggaaatccgcaagtttaaataaggctagtccgttatcagcgtgaaaacgcggcaccgagtcggtgcatcatctttggtgtttcctatgacgcggttctatctagttacgcgttaaaccaactagaa

SEQ ID NO: 1034 - RNA, 159 nt, synthetic construct
  source 1..159: mol_type = other RNA
gttcatcataggaaacaccaagtttaagagcggggaaatccgcaagtttaaataaggctagtccgttatcagcgtgaaaacgcggcaccgagtcggtgctatcatctttggtgtttcctatgcgcggttctatctagttacgcgttaaaccaactagaa

SEQ ID NO: 1035 - RNA, 159 nt, synthetic construct
  source 1..159: mol_type = other RNA
gttcatcataggaaacaccaagtttaagagcggggaaatccgcaagtttaaataaggctagtccgttatcagcgtgaaaacgcggcaccgagtcggtgcatatcatctttggtgtttcctatcgcggttctatctagttacgcgttaaaccaactagaa

SEQ ID NO: 1036 - RNA, 159 nt, synthetic construct
  source 1..159: mol_type = other RNA
gttcatcataggaaacaccaagtttaagagcggggaaatccgcaagtttaaataaggctagtccgttatcagcgtgaaaacgcggcaccgagtcggtgcaatatcatctttggtgtttcctacgcggttctatctagttacgcgttaaaccaactagaa

SEQ ID NO: 1037 - RNA, 159 nt, synthetic construct
  source 1..159: mol_type = other RNA
gttcatcataggaaacaccaagtttaagagcggggaaatccgcaagtttaaataaggctagtccgttatcagcgtgaaaacgcggcaccgagtcggtgcaaatatcatctttggtgtttcctcgcggttctatctagttacgcgttaaaccaactagaa

SEQ ID NO: 1038 - RNA, 159 nt, synthetic construct
  source 1..159: mol_type = other RNA
gttcatcataggaaacaccaagtttaagagcggggaaatccgcaagtttaaataaggctagtccgttatcagcgtgaaaacgcggcaccgagtcggtgcaaaatatcatctttggtgtttcccgcggttctatctagttacgcgttaaaccaactagaa

SEQ ID NO: 1039 - RNA, 160 nt, synthetic construct
  source 1..160: mol_type = other RNA
gttcatcataggaaacaccaagttttagagctagaaatagcaagttaaaataaggctagtccgttatcaacttgaaaaagtggcaccgagtcggtgcattaaagaaaatatcatctttggtgtttcctatttacatctcgggtctctacgtgggggcccg

SEQ ID NO: 1040 - RNA, 160 nt, synthetic construct
  source 1..160: mol_type = other RNA
gttcatcataggaaacaccaagttttagagctagaaatagcaagttaaaataaggctagtccgttatcaacttgaaaaagtggcaccgagtcggtgcattaaagaaaatatcatctttggtgtttcctatttcaagctcgggtctctacgtgggggcccg

SEQ ID NO: 1041 - RNA, 160 nt, synthetic construct
  source 1..160: mol_type = other RNA
gaccattaaagaaaatatcatgtttaagagctagaaatagcaagtttaaataaggctagtccgttatcagcgtgaaaacgcggcaccgagtcggtgcaccaaagatgatattttctttaaagtcgcggttctatctagttacgcgttaaaccaactagaa

SEQ ID NO: 1042 - RNA, 160 nt, synthetic construct
  source 1..160: mol_type = other RNA
gaccattaaagaaaatatcatgtttaagagctagaaatagcaagtttaaataaggctagtccgttatcagcgtgaaaacgcggcaccgagtcggtgcaacaccaaagatgatattttcacaaccgcggttctatctagttacgcgttaaaccaactagaa

SEQ ID NO: 1043 - RNA, 160 nt, synthetic construct
  source 1..160: mol_type = other RNA
gttcatcataggaaacaccaagtttaagagcggggaaatccgcaagtttaaataaggctagtccgttatcagcgtgaaaacgcggcaccgagtcggtgcatcatctttggtgtttcctatgatcgcggttctatctagttacgcgttaaaccaactagaa

SEQ ID NO: 1044 - RNA, 160 nt, synthetic construct
  source 1..160: mol_type = other RNA
gttcatcataggaaacaccaagtttaagagcggggaaatccgcaagtttaaataaggctagtccgttatcagcgtgaaaacgcggcaccgagtcggtgctatcatctttggtgtttcctatgacgcggttctatctagttacgcgttaaaccaactagaa

SEQ ID NO: 1045 - RNA, 160 nt, synthetic construct
  source 1..160: mol_type = other RNA
gttcatcataggaaacaccaagtttaagagcggggaaatccgcaagtttaaataaggctagtccgttatcagcgtgaaaacgcggcaccgagtcggtgcatatcatctttggtgtttcctatgcgcggttctatctagttacgcgttaaaccaactagaa

SEQ ID NO: 1046 - RNA, 160 nt, synthetic construct
  source 1..160: mol_type = other RNA
gttcatcataggaaacaccaagtttaagagcggggaaatccgcaagtttaaataaggctagtccgttatcagcgtgaaaacgcggcaccgagtcggtgcaatatcatctttggtgtttcctatcgcggttctatctagttacgcgttaaaccaactagaa

SEQ ID NO: 1047 - RNA, 160 nt, synthetic construct
  source 1..160: mol_type = other RNA
gttcatcataggaaacaccaagtttaagagcggggaaatccgcaagtttaaataaggctagtccgttatcagcgtgaaaacgcggcaccgagtcggtgcaaatatcatctttggtgtttcctacgcggttctatctagttacgcgttaaaccaactagaa

SEQ ID NO: 1048 - RNA, 160 nt, synthetic construct
  source 1..160: mol_type = other RNA
gttcatcataggaaacaccaagtttaagagcggggaaatccgcaagtttaaataaggctagtccgttatcagcgtgaaaacgcggcaccgagtcggtgcaaaatatcatctttggtgtttcctcgcggttctatctagttacgcgttaaaccaactagaa

SEQ ID NO: 1049 - RNA, 160 nt, synthetic construct
  source 1..160: mol_type = other RNA
gttcatcataggaaacaccaagtttaagagcggggaaatccgcaagtttaaataaggctagtccgttatcagcgtgaaaacgcggcaccgagtcggtgcgaaaatatcatctttggtgtttcccgcggttctatctagttacgcgttaaaccaactagaa

SEQ ID NO: 1050 - RNA, 161 nt, synthetic construct
  source 1..161: mol_type = other RNA
gttcatcataggaaacaccaagtttaagagcggggaaatccgcaagtttaaataaggctagtccgttatcagcgtgaaaacgcggcaccgagtcggtgcatcatctttggtgtttcctatgatgcgcggttctatctagttacgcgttaaaccaactagaa

SEQ ID NO: 1051 - RNA, 161 nt, synthetic construct
  source 1..161: mol_type = other RNA
gttcatcataggaaacaccaagtttaagagcggggaaatccgcaagtttaaataaggctagtccgttatcagcgtgaaaacgcggcaccgagtcggtgctatcatctttggtgtttcctatgatcgcggttctatctagttacgcgttaaaccaactagaa

SEQ ID NO: 1052 - RNA, 161 nt, synthetic construct
  source 1..161: mol_type = other RNA
gttcatcataggaaacaccaagtttaagagcggggaaatccgcaagtttaaataaggctagtccgttatcagcgtgaaaacgcggcaccgagtcggtgcatatcatctttggtgtttcctatgacgcggttctatctagttacgcgttaaaccaactagaa

SEQ ID NO: 1053 - RNA, 161 nt, synthetic construct
  source 1..161: mol_type = other RNA
gttcatcataggaaacaccaagtttaagagcggggaaatccgcaagtttaaataaggctagtccgttatcagcgtgaaaacgcggcaccgagtcggtgcaatatcatctttggtgtttcctatgcgcggttctatctagttacgcgttaaaccaactagaa

SEQ ID NO: 1054 - RNA, 161 nt, synthetic construct
  source 1..161: mol_type = other RNA
gttcatcataggaaacaccaagtttaagagcggggaaatccgcaagtttaaataaggctagtccgttatcagcgtgaaaacgcggcaccgagtcggtgcaaatatcatctttggtgtttcctatcgcggttctatctagttacgcgttaaaccaactagaa

SEQ ID NO: 1055 - RNA, 161 nt, synthetic construct
  source 1..161: mol_type = other RNA
gttcatcataggaaacaccaagtttaagagcggggaaatccgcaagtttaaataaggctagtccgttatcagcgtgaaaacgcggcaccgagtcggtgcaaaatatcatctttggtgtttcctacgcggttctatctagttacgcgttaaaccaactagaa

SEQ ID NO: 1056 - RNA, 161 nt, synthetic construct
  source 1..161: mol_type = other RNA
gttcatcataggaaacaccaagtttaagagcggggaaatccgcaagtttaaataaggctagtccgttatcagcgtgaaaacgcggcaccgagtcggtgcgaaaatatcatctttggtgtttcctcgcggttctatctagttacgcgttaaaccaactagaa

SEQ ID NO: 1057 - RNA, 161 nt, synthetic construct
  source 1..161: mol_type = other RNA
gttcatcataggaaacaccaagtttaagagcggggaaatccgcaagtttaaataaggctagtccgttatcagcgtgaaaacgcggcaccgagtcggtgcagaaaatatcatctttggtgtttcccgcggttctatctagttacgcgttaaaccaactagaa

SEQ ID NO: 1058 - RNA, 162 nt, synthetic construct
  source 1..162: mol_type = other RNA
gaccattaaagaaaatatcatgtttaagagctagaaatagcaagtttaaataaggctagtccgttatcagcgtgaaaacgcggcaccgagtcggtgcaacaccaaagatgatattttcttagcttcgcggttctatctagttacgcgttaaaccaactagaa

SEQ ID NO: 1059 - RNA, 162 nt, synthetic construct
  source 1..162: mol_type = other RNA
gttcatcataggaaacaccaagtttaagagcggggaaatccgcaagtttaaataaggctagtccgttatcagcgtgaaaacgcggcaccgagtcggtgctatcatctttggtgtttcctatgatgcgcggttctatctagttacgcgttaaaccaactagaa

SEQ ID NO: 1060 - RNA, 162 nt, synthetic construct
  source 1..162: mol_type = other RNA
gttcatcataggaaacaccaagtttaagagcggggaaatccgcaagtttaaataaggctagtccgttatcagcgtgaaaacgcggcaccgagtcggtgcatatcatctttggtgtttcctatgatcgcggttctatctagttacgcgttaaaccaactagaa

SEQ ID NO: 1061 - RNA, 162 nt, synthetic construct
  source 1..162: mol_type = other RNA
gttcatcataggaaacaccaagtttaagagcggggaaatccgcaagtttaaataaggctagtccgttatcagcgtgaaaacgcggcaccgagtcggtgcaatatcatctttggtgtttcctatgacgcggttctatctagttacgcgttaaaccaactagaa

SEQ ID NO: 1062 - RNA, 162 nt, synthetic construct
  source 1..162: mol_type = other RNA
gttcatcataggaaacaccaagtttaagagcggggaaatccgcaagtttaaataaggctagtccgttatcagcgtgaaaacgcggcaccgagtcggtgcaaatatcatctttggtgtttcctatgcgcggttctatctagttacgcgttaaaccaactagaa

SEQ ID NO: 1063 - RNA, 162 nt, synthetic construct
  source 1..162: mol_type = other RNA
gttcatcataggaaacaccaagtttaagagcggggaaatccgcaagtttaaataaggctagtccgttatcagcgtgaaaacgcggcaccgagtcggtgcaaaatatcatctttggtgtttcctatcgcggttctatctagttacgcgttaaaccaactagaa

SEQ ID NO: 1064 - RNA, 162 nt, synthetic construct
  source 1..162: mol_type = other RNA
gttcatcataggaaacaccaagtttaagagcggggaaatccgcaagtttaaataaggctagtccgttatcagcgtgaaaacgcggcaccgagtcggtgcgaaaatatcatctttggtgtttcctacgcggttctatctagttacgcgttaaaccaactagaa

SEQ ID NO: 1065 - RNA, 162 nt, synthetic construct
  source 1..162: mol_type = other RNA
gttcatcataggaaacaccaagtttaagagcggggaaatccgcaagtttaaataaggctagtccgttatcagcgtgaaaacgcggcaccgagtcggtgcagaaaatatcatctttggtgtttcctcgcggttctatctagttacgcgttaaaccaactagaa

SEQ ID NO: 1066 - RNA, 162 nt, synthetic construct
  source 1..162: mol_type = other RNA
gttcatcataggaaacaccaagtttaagagcggggaaatccgcaagtttaaataaggctagtccgttatcagcgtgaaaacgcggcaccgagtcggtgcaagaaaatatcatctttggtgtttcccgcggttctatctagttacgcgttaaaccaactagaa

SEQ ID NO: 1067 - RNA, 163 nt, synthetic construct
  source 1..163: mol_type = other RNA
gaccattaaagaaaatatcatgtttaagagctagaaatagcaagtttaaataaggctagtccgttatcagcgtgaaaacgcggcaccgagtcggtgcaacaccaaagatgatattttctttaacttcgcggttctatctagttacgcgttaaaccaactagaa

SEQ ID NO: 1068 - RNA, 163 nt, synthetic construct
  source 1..163: mol_type = other RNA
gaccattaaagaaaatatcatgtttaagagctagaaatagcaagtttaaataaggctagtccgttatcagcgtgaaaacgcggcaccgagtcggtgcaccaaagatgatattttctttaatgacttcgcggttctatctagttacgcgttaaaccaactagaa

SEQ ID NO: 1069 - RNA, 163 nt, synthetic construct
  source 1..163: mol_type = other RNA
gaccattaaagaaaatatcatgtttaagagctagaaatagcaagtttaaataaggctagtccgttatcagcgtgaaaacgcggcaccgagtcggtgcggaaacaccaaagatgatattttcaatgccgcggttctatctagttacgcgttaaaccaactagaa

SEQ ID NO: 1070 - RNA, 163 nt, synthetic construct
  source 1..163: mol_type = other RNA
gttcatcataggaaacaccaagtttaagagcggggaaatccgcaagtttaaataaggctagtccgttatcagcgtgaaaacgcggcaccgagtcggtgcatatcatctttggtgtttcctatgatgcgcggttctatctagttacgcgttaaaccaactagaa

SEQ ID NO: 1071 - RNA, 163 nt, synthetic construct
  source 1..163: mol_type = other RNA
gttcatcataggaaacaccaagtttaagagcggggaaatccgcaagtttaaataaggctagtccgttatcagcgtgaaaacgcggcaccgagtcggtgcaatatcatctttggtgtttcctatgatcgcggttctatctagttacgcgttaaaccaactagaa

SEQ ID NO: 1072 - RNA, 163 nt, synthetic construct
  source 1..163: mol_type = other RNA
gttcatcataggaaacaccaagtttaagagcggggaaatccgcaagtttaaataaggctagtccgttatcagcgtgaaaacgcggcaccgagtcggtgcaaatatcatctttggtgtttcctatgacgcggttctatctagttacgcgttaaaccaactagaa

SEQ ID NO: 1073 - RNA, 163 nt, synthetic construct
  source 1..163: mol_type = other RNA
gttcatcataggaaacaccaagtttaagagcggggaaatccgcaagtttaaataaggctagtccgttatcagcgtgaaaacgcggcaccgagtcggtgcaaaatatcatctttggtgtttcctatgcgcggttctatctagttacgcgttaaaccaactagaa

SEQ ID NO: 1074 - RNA, 163 nt, synthetic construct
  source 1..163: mol_type = other RNA
gttcatcataggaaacaccaagtttaagagcggggaaatccgcaagtttaaataaggctagtccgttatcagcgtgaaaacgcggcaccgagtcggtgcgaaaatatcatctttggtgtttcctatcgcggttctatctagttacgcgttaaaccaactagaa

SEQ ID NO: 1075 - RNA, 163 nt, synthetic construct
  source 1..163: mol_type = other RNA
gttcatcataggaaacaccaagtttaagagcggggaaatccgcaagtttaaataaggctagtccgttatcagcgtgaaaacgcggcaccgagtcggtgcagaaaatatcatctttggtgtttcctacgcggttctatctagttacgcgttaaaccaactagaa

SEQ ID NO: 1076 - RNA, 163 nt, synthetic construct
  source 1..163: mol_type = other RNA
gttcatcataggaaacaccaagtttaagagcggggaaatccgcaagtttaaataaggctagtccgttatcagcgtgaaaacgcggcaccgagtcggtgcaagaaaatatcatctttggtgtttcctcgcggttctatctagttacgcgttaaaccaactagaa

SEQ ID NO: 1077 - RNA, 163 nt, synthetic construct
  source 1..163: mol_type = other RNA
gttcatcataggaaacaccaagtttaagagcggggaaatccgcaagtttaaataaggctagtccgttatcagcgtgaaaacgcggcaccgagtcggtgcaaagaaaatatcatctttggtgtttcccgcggttctatctagttacgcgttaaaccaactagaa

SEQ ID NO: 1078 - RNA, 164 nt, synthetic construct
  source 1..164: mol_type = other RNA
gtctgtatctatattcatcatgtttaagagcggggaaatccgcaagtttaaataaggctagtccgttatcagcgtgaaaacgcggcaccgagtcggtgccatctttggtgtttcctatgatgaatatcgcggttctatctagttacgcgttaaaccaactagaa

SEQ ID NO: 1079 - RNA, 164 nt, synthetic construct
  source 1..164: mol_type = other RNA
gttcatcataggaaacaccaagtttaagagcggggaaatccgcaagtttaaataaggctagtccgttatcagcgtgaaaacgcggcaccgagtcggtgcaatatcatctttggtgtttcctatgatgcgcggttctatctagttacgcgttaaaccaactagaa

SEQ ID NO: 1080 - RNA, 164 nt, synthetic construct
  source 1..164: mol_type = other RNA
gttcatcataggaaacaccaagtttaagagcggggaaatccgcaagtttaaataaggctagtccgttatcagcgtgaaaacgcggcaccgagtcggtgcaaatatcatctttggtgtttcctatgatcgcggttctatctagttacgcgttaaaccaactagaa

SEQ ID NO: 1081 - RNA, 164 nt, synthetic construct
  source 1..164: mol_type = other RNA
gttcatcataggaaacaccaagtttaagagcggggaaatccgcaagtttaaataaggctagtccgttatcagcgtgaaaacgcggcaccgagtcggtgcaaaatatcatctttggtgtttcctatgacgcggttctatctagttacgcgttaaaccaactagaa

SEQ ID NO: 1082 - RNA, 164 nt, synthetic construct
  source 1..164: mol_type = other RNA
gttcatcataggaaacaccaagtttaagagcggggaaatccgcaagtttaaataaggctagtccgttatcagcgtgaaaacgcggcaccgagtcggtgcgaaaatatcatctttggtgtttcctatgcgcggttctatctagttacgcgttaaaccaactagaa

SEQ ID NO: 1083 - RNA, 164 nt, synthetic construct
  source 1..164: mol_type = other RNA
gttcatcataggaaacaccaagtttaagagcggggaaatccgcaagtttaaataaggctagtccgttatcagcgtgaaaacgcggcaccgagtcggtgcagaaaatatcatctttggtgtttcctatcgcggttctatctagttacgcgttaaaccaactagaa

SEQ ID NO: 1084 - RNA, 164 nt, synthetic construct
  source 1..164: mol_type = other RNA
gttcatcataggaaacaccaagtttaagagcggggaaatccgcaagtttaaataaggctagtccgttatcagcgtgaaaacgcggcaccgagtcggtgcaagaaaatatcatctttggtgtttcctacgcggttctatctagttacgcgttaaaccaactagaa

SEQ ID NO: 1085 - RNA, 164 nt, synthetic construct
  source 1..164: mol_type = other RNA
gttcatcataggaaacaccaagtttaagagcggggaaatccgcaagtttaaataaggctagtccgttatcagcgtgaaaacgcggcaccgagtcggtgcaaagaaaatatcatctttggtgtttcctcgcggttctatctagttacgcgttaaaccaactagaa

SEQ ID NO: 1086 - RNA, 164 nt, synthetic construct
  source 1..164: mol_type = other RNA
gttcatcataggaaacaccaagtttaagagcggggaaatccgcaagtttaaataaggctagtccgttatcagcgtgaaaacgcggcaccgagtcggtgctaaagaaaatatcatctttggtgtttcccgcggttctatctagttacgcgttaaaccaactagaa

SEQ ID NO: 1087 - RNA, 165 nt, synthetic construct
  source 1..165: mol_type = other RNA
gaccattaaagaaaatatcatgtttaagagctagaaatagcaagtttaaataaggctagtccgttatcagcgtgaaaacgcggcaccgagtcggtgcggaaacaccaaagatgatattttcttaatttcgcggttctatctagttacgcgttaaaccaactagaa

SEQ ID NO: 1088 - RNA, 165 nt, synthetic construct
  source 1..165: mol_type = other RNA
gtctgtatctatattcatcatgtttaagagcggggaaatccgcaagtttaaataaggctagtccgttatcagcgtgaaaacgcggcaccgagtcggtgccatctttggtgtttcctatgatgaatatacgcggttctatctagttacgcgttaaaccaactagaa

SEQ ID NO: 1089 - RNA, 165 nt, synthetic construct
  source 1..165: mol_type = other RNA
gtctgtatctatattcatcatgtttaagagcggggaaatccgcaagtttaaataaggctagtccgttatcagcgtgaaaacgcggcaccgagtcggtgctcatctttggtgtttcctatgatgaatatcgcggttctatctagttacgcgttaaaccaactagaa

SEQ ID NO: 1090 - RNA, 165 nt, synthetic construct
  source 1..165: mol_type = other RNA
gttcatcataggaaacaccaagtttaagagcggggaaatccgcaagtttaaataaggctagtccgttatcagcgtgaaaacgcggcaccgagtcggtgcaaatatcatctttggtgtttcctatgatgcgcggttctatctagttacgcgttaaaccaactagaa

SEQ ID NO: 1091 - RNA, 165 nt, synthetic construct
  source 1..165: mol_type = other RNA
gttcatcataggaaacaccaagtttaagagcggggaaatccgcaagtttaaataaggctagtccgttatcagcgtgaaaacgcggcaccgagtcggtgcaaaatatcatctttggtgtttcctatgatcgcggttctatctagttacgcgttaaaccaactagaa

SEQ ID NO: 1092 - RNA, 165 nt, synthetic construct
  source 1..165: mol_type = other RNA
gttcatcataggaaacaccaagtttaagagcggggaaatccgcaagtttaaataaggctagtccgttatcagcgtgaaaacgcggcaccgagtcggtgcgaaaatatcatctttggtgtttcctatgacgcggttctatctagttacgcgttaaaccaactagaa

SEQ ID NO: 1093 - RNA, 165 nt, synthetic construct
  source 1..165: mol_type = other RNA
gttcatcataggaaacaccaagtttaagagcggggaaatccgcaagtttaaataaggctagtccgttatcagcgtgaaaacgcggcaccgagtcggtgcagaaaatatcatctttggtgtttcctatgcgcggttctatctagttacgcgttaaaccaactagaa

SEQ ID NO: 1094 - RNA, 165 nt, synthetic construct
  source 1..165: mol_type = other RNA
gttcatcataggaaacaccaagtttaagagcggggaaatccgcaagtttaaataaggctagtccgttatcagcgtgaaaacgcggcaccgagtcggtgcaagaaaatatcatctttggtgtttcctatcgcggttctatctagttacgcgttaaaccaactagaa

SEQ ID NO: 1095 - RNA, 165 nt, synthetic construct
  source 1..165: mol_type = other RNA
gttcatcataggaaacaccaagtttaagagcggggaaatccgcaagtttaaataaggctagtccgttatcagcgtgaaaacgcggcaccgagtcggtgcaaagaaaatatcatctttggtgtttcctacgcggttctatctagttacgcgttaaaccaactagaa

SEQ ID NO: 1096 - RNA, 165 nt, synthetic construct
  source 1..165: mol_type = other RNA
gttcatcataggaaacaccaagtttaagagcggggaaatccgcaagtttaaataaggctagtccgttatcagcgtgaaaacgcggcaccgagtcggtgctaaagaaaatatcatctttggtgtttcctcgcggttctatctagttacgcgttaaaccaactagaa

SEQ ID NO: 1097 - RNA, 165 nt, synthetic construct
  source 1..165: mol_type = other RNA
gttcatcataggaaacaccaagtttaagagcggggaaatccgcaagtttaaataaggctagtccgttatcagcgtgaaaacgcggcaccgagtcggtgcttaaagaaaatatcatctttggtgtttcccgcggttctatctagttacgcgttaaaccaactagaa

SEQ ID NO: 1098 - RNA, 166 nt, synthetic construct
  source 1..166: mol_type = other RNA
gaccattaaagaaaatatcatgtttaagagctagaaatagcaagtttaaataaggctagtccgttatcagcgtgaaaacgcggcaccgagtcggtgcggaaacaccaaagatgatattttctttaaaatcgcggttctatctagttacgcgttaaaccaactagaa

SEQ ID NO: 1099 - RNA, 166 nt, synthetic construct
  source 1..166: mol_type = other RNA
gaccattaaagaaaatatcatgtttaagagctagaaatagcaagtttaaataaggctagtccgttatcagcgtgaaaacgcggcaccgagtcggtgcaacaccaaagatgatattttctttaatgacttcgcggttctatctagttacgcgttaaaccaactagaa

SEQ ID NO: 1100 - RNA, 166 nt, synthetic construct
  source 1..166: mol_type = other RNA
gaccattaaagaaaatatcatgtttaagagctagaaatagcaagtttaaataaggctagtccgttatcagcgtgaaaacgcggcaccgagtcggtgcataggaaacaccaaagatgatattttcaatgccgcggttctatctagttacgcgttaaaccaactagaa

SEQ ID NO: 1101 - RNA, 166 nt, synthetic construct
  source 1..166: mol_type = other RNA
gtctgtatctatattcatcatgtttaagagcggggaaatccgcaagtttaaataaggctagtccgttatcagcgtgaaaacgcggcaccgagtcggtgccatctttggtgtttcctatgatgaatatagcgcggttctatctagttacgcgttaaaccaactagaa

SEQ ID NO: 1102 - RNA, 166 nt, synthetic construct
  source 1..166: mol_type = other RNA
gtctgtatctatattcatcatgtttaagagcggggaaatccgcaagtttaaataaggctagtccgttatcagcgtgaaaacgcggcaccgagtcggtgctcatctttggtgtttcctatgatgaatatacgcggttctatctagttacgcgttaaaccaactagaa

SEQ ID NO: 1103 - RNA, 166 nt, synthetic construct
  source 1..166: mol_type = other RNA
gtctgtatctatattcatcatgtttaagagcggggaaatccgcaagtttaaataaggctagtccgttatcagcgtgaaaacgcggcaccgagtcggtgcatcatctttggtgtttcctatgatgaatatcgcggttctatctagttacgcgttaaaccaactagaa

SEQ ID NO: 1104 - RNA, 166 nt, synthetic construct
  source 1..166: mol_type = other RNA
gttcatcataggaaacaccaagtttaagagcggggaaatccgcaagtttaaataaggctagtccgttatcagcgtgaaaacgcggcaccgagtcggtgcaaaatatcatctttggtgtttcctatgatgcgcggttctatctagttacgcgttaaaccaactagaa

SEQ ID NO: 1105 - RNA, 166 nt, synthetic construct
  source 1..166: mol_type = other RNA
gttcatcataggaaacaccaagtttaagagcggggaaatccgcaagtttaaataaggctagtccgttatcagcgtgaaaacgcggcaccgagtcggtgcgaaaatatcatctttggtgtttcctatgatcgcggttctatctagttacgcgttaaaccaactagaa

SEQ ID NO: 1106 - RNA, 166 nt, synthetic construct
  source 1..166: mol_type = other RNA
gttcatcataggaaacaccaagtttaagagcggggaaatccgcaagtttaaataaggctagtccgttatcagcgtgaaaacgcggcaccgagtcggtgcagaaaatatcatctttggtgtttcctatgacgcggttctatctagttacgcgttaaaccaactagaa

SEQ ID NO: 1107 - RNA, 166 nt, synthetic construct
  source 1..166: mol_type = other RNA
gttcatcataggaaacaccaagtttaagagcggggaaatccgcaagtttaaataaggctagtccgttatcagcgtgaaaacgcggcaccgagtcggtgcaagaaaatatcatctttggtgtttcctatgcgcggttctatctagttacgcgttaaaccaactagaa

SEQ ID NO: 1108 - RNA, 166 nt, synthetic construct
  source 1..166: mol_type = other RNA
gttcatcataggaaacaccaagtttaagagcggggaaatccgcaagtttaaataaggctagtccgttatcagcgtgaaaacgcggcaccgagtcggtgcaaagaaaatatcatctttggtgtttcctatcgcggttctatctagttacgcgttaaaccaactagaa

SEQ ID NO: 1109 - RNA, 166 nt, synthetic construct
  source 1..166: mol_type = other RNA
gttcatcataggaaacaccaagtttaagagcggggaaatccgcaagtttaaataaggctagtccgttatcagcgtgaaaacgcggcaccgagtcggtgctaaagaaaatatcatctttggtgtttcctacgcggttctatctagttacgcgttaaaccaactagaa

SEQ ID NO: 1110 - RNA, 166 nt, synthetic construct
  source 1..166: mol_type = other RNA
gttcatcataggaaacaccaagtttaagagcggggaaatccgcaagtttaaataaggctagtccgttatcagcgtgaaaacgcggcaccgagtcggtgcttaaagaaaatatcatctttggtgtttcctcgcggttctatctagttacgcgttaaaccaactagaa

SEQ ID NO: 1111 - RNA, 166 nt, synthetic construct
  source 1..166: mol_type = other RNA
gttcatcataggaaacaccaagtttaagagcggggaaatccgcaagtttaaataaggctagtccgttatcagcgtgaaaacgcggcaccgagtcggtgcattaaagaaaatatcatctttggtgtttcccgcggttctatctagttacgcgttaaaccaactagaa

SEQ ID NO: 1112 - RNA, 167 nt, synthetic construct
  source 1..167: mol_type = other RNA
gtctgtatctatattcatcatgtttaagagctagaaatagcaagtttaaataaggctagtccgttatcagcgtgaaaacgcggcaccgagtcggtgctcatctttggtgtttcctatgatgaatatatctcgcggttctatctagttacgcgttaaaccaactagaa

SEQ ID NO: 1113 - RNA, 167 nt, synthetic construct
  source 1..167: mol_type = other RNA
gtctgtatctatattcatcatgtttaagagcggggaaatccgcaagtttaaataaggctagtccgttatcagcgtgaaaacgcggcaccgagtcggtgccatctttggtgtttcctatgatgaatatagacgcggttctatctagttacgcgttaaaccaactagaa

SEQ ID NO: 1114 - RNA, 167 nt, synthetic construct
  source 1..167: mol_type = other RNA
gtctgtatctatattcatcatgtttaagagcggggaaatccgcaagtttaaataaggctagtccgttatcagcgtgaaaacgcggcaccgagtcggtgctcatctttggtgtttcctatgatgaatatagcgcggttctatctagttacgcgttaaaccaactagaa

SEQ ID NO: 1115 - RNA, 167 nt, synthetic construct
  source 1..167: mol_type = other RNA
gtctgtatctatattcatcatgtttaagagcggggaaatccgcaagtttaaataaggctagtccgttatcagcgtgaaaacgcggcaccgagtcggtgcatcatctttggtgtttcctatgatgaatatacgcggttctatctagttacgcgttaaaccaactagaa

SEQ ID NO: 1116 - RNA, 167 nt, synthetic construct
  source 1..167: mol_type = other RNA
gtctgtatctatattcatcatgtttaagagcggggaaatccgcaagtttaaataaggctagtccgttatcagcgtgaaaacgcggcaccgagtcggtgctatcatctttggtgtttcctatgatgaatatcgcggttctatctagttacgcgttaaaccaactagaa

SEQ ID NO: 1117 - RNA, 167 nt, synthetic construct
  source 1..167: mol_type = other RNA
gttcatcataggaaacaccaagtttaagagcggggaaatccgcaagtttaaataaggctagtccgttatcagcgtgaaaacgcggcaccgagtcggtgcgaaaatatcatctttggtgtttcctatgatgcgcggttctatctagttacgcgttaaaccaactagaa

SEQ ID NO: 1118 - RNA, 167 nt, synthetic construct
  source 1..167: mol_type = other RNA
gttcatcataggaaacaccaagtttaagagcggggaaatccgcaagtttaaataaggctagtccgttatcagcgtgaaaacgcggcaccgagtcggtgcagaaaatatcatctttggtgtttcctatgatcgcggttctatctagttacgcgttaaaccaactagaa

SEQ ID NO: 1119 - RNA, 167 nt, synthetic construct
  source 1..167: mol_type = other RNA
gttcatcataggaaacaccaagtttaagagcggggaaatccgcaagtttaaataaggctagtccgttatcagcgtgaaaacgcggcaccgagtcggtgcaagaaaatatcatctttggtgtttcctatgacgcggttctatctagttacgcgttaaaccaactagaa

SEQ ID NO: 1120 - RNA, 167 nt, synthetic construct
  source 1..167: mol_type = other RNA
gttcatcataggaaacaccaagtttaagagcggggaaatccgcaagtttaaataaggctagtccgttatcagcgtgaaaacgcggcaccgagtcggtgcaaagaaaatatcatctttggtgtttcctatgcgcggttctatctagttacgcgttaaaccaactagaa

SEQ ID NO: 1121 - RNA, 167 nt, synthetic construct
  source 1..167: mol_type = other RNA
gttcatcataggaaacaccaagtttaagagcggggaaatccgcaagtttaaataaggctagtccgttatcagcgtgaaaacgcggcaccgagtcggtgctaaagaaaatatcatctttggtgtttcctatcgcggttctatctagttacgcgttaaaccaactagaa

SEQ ID NO: 1122 - RNA, 167 nt, synthetic construct
  source 1..167: mol_type = other RNA
gttcatcataggaaacaccaagtttaagagcggggaaatccgcaagtttaaataaggctagtccgttatcagcgtgaaaacgcggcaccgagtcggtgcttaaagaaaatatcatctttggtgtttcctacgcggttctatctagttacgcgttaaaccaactagaa

SEQ ID NO: 1123 - RNA, 167 nt, synthetic construct
  source 1..167: mol_type = other RNA
gttcatcataggaaacaccaagtttaagagcggggaaatccgcaagtttaaataaggctagtccgttatcagcgtgaaaacgcggcaccgagtcggtgcattaaagaaaatatcatctttggtgtttcctcgcggttctatctagttacgcgttaaaccaactagaa

SEQ ID NO: 1124 - RNA, 167 nt, synthetic construct
  source 1..167: mol_type = other RNA
gttcatcataggaaacaccaagtttaagagcggggaaatccgcaagtttaaataaggctagtccgttatcagcgtgaaaacgcggcaccgagtcggtgccattaaagaaaatatcatctttggtgtttcccgcggttctatctagttacgcgttaaaccaactagaa

SEQ ID NO: 1125 - RNA, 168 nt, synthetic construct
  source 1..168: mol_type = other RNA
gaccattaaagaaaatatcatgtttaagagctagaaatagcaagtttaaataaggctagtccgttatcagcgtgaaaacgcggcaccgagtcggtgcataggaaacaccaaagatgatattttcttacgctcgcggttctatctagttacgcgttaaaccaactagaa

SEQ ID NO: 1126 - RNA, 168 nt, synthetic construct
  source 1..168: mol_type = other RNA
gttcatcataggaaacaccaagtttaagagctagaaatagcaagtttaaataaggctagtccgttatcagcgtgaaaacgcggcaccgagtcggtgcaagaaaatataatattcggtgtttcctatgtcctcgcggttctatctagttacgcgttaaaccaactagaa

SEQ ID NO: 1127 - RNA, 168 nt, synthetic construct
  source 1..168: mol_type = other RNA
gttcatcataggaaacaccaagtttaagagctagaaatagcaagtttaaataaggctagtccgttatcagcgtgaaaacgcggcaccgagtcggtgcaagaaaatataatcttcggtgtttcctatgtcttcgcggttctatctagttacgcgttaaaccaactagaa

SEQ ID NO: 1128 - RNA, 168 nt, synthetic construct
  source 1..168: mol_type = other RNA
gttcatcataggaaacaccaagtttaagagctagaaatagcaagtttaaataaggctagtccgttatcagcgtgaaaacgcggcaccgagtcggtgcaagaaaacataatattcggtgtttcctatgtactcgcggttctatctagttacgcgttaaaccaactagaa

SEQ ID NO: 1129 - RNA, 168 nt, synthetic construct
  source 1..168: mol_type = other RNA
gttcatcataggaaacaccaagtttaagagctagaaatagcaagtttaaataaggctagtccgttatcagcgtgaaaacgcggcaccgagtcggtgcaagaaaatataatatttggtgtttcctatgtctccgcggttctatctagttacgcgttaaaccaactagaa

SEQ ID NO: 1130 - RNA, 168 nt, synthetic construct
  source 1..168: mol_type = other RNA
gttcatcataggaaacaccaagtttaagagctagaaatagcaagtttaaataaggctagtccgttatcagcgtgaaaacgcggcaccgagtcggtgcaagaaaatataatctttggtgtttcctatgtgcccgcggttctatctagttacgcgttaaaccaactagaa

SEQ ID NO: 1131 - RNA, 168 nt, synthetic construct
  source 1..168: mol_type = other RNA
gttcatcataggaaacaccaagtttaagagctagaaatagcaagtttaaataaggctagtccgttatcagcgtgaaaacgcggcaccgagtcggtgcaagaaaacataatatttggtgtttcctatgtcctcgcggttctatctagttacgcgttaaaccaactagaa

SEQ ID NO: 1132 - RNA, 168 nt, synthetic construct
  source 1..168: mol_type = other RNA
gttcatcataggaaacaccaagtttaagagctagaaatagcaagtttaaataaggctagtccgttatcagcgtgaaaacgcggcaccgagtcggtgcaagaaaacataatcttcggtgtttcctatgtcatcgcggttctatctagttacgcgttaaaccaactagaa

SEQ ID NO: 1133 - RNA, 168 nt, synthetic construct
  source 1..168: mol_type = other RNA
gttcatcataggaaacaccaagtttaagagctagaaatagcaagtttaaataaggctagtccgttatcagcgtgaaaacgcggcaccgagtcggtgcaagaaaatatcatattcggtgtttcctatgtattcgcggttctatctagttacgcgttaaaccaactagaa

SEQ ID NO: 1134 - RNA, 168 nt, synthetic construct
  source 1..168: mol_type = other RNA
gttcatcataggaaacaccaagttttagagctagaaatagcaagttaaaataaggctagtccgttatcgacttgaaaaagtcgcaccgagtcggtgcaagaaaacatcatcttcggtgtttcctatgtattcgcggttctatctagttacgcgttaaaccaactagaa

SEQ ID NO: 1135 - RNA, 168 nt, synthetic construct
  source 1..168: mol_type = other RNA
gttcatcataggaaacaccaagtttaagagctagaaatagcaagtttaaataaggctagtccgttatcagcgtgaaaacgcggcaccgagtcggtgcaagaaaatattatcttcggtgtttcctatgtcctcgcggttctatctagttacgcgttaaaccaactagaa

SEQ ID NO: 1136 - RNA, 168 nt, synthetic construct
  source 1..168: mol_type = other RNA
gttcatcataggaaacaccaagtttaagagctagaaatagcaagtttaaataaggctagtccgttatcagcgtgaaaacgcggcaccgagtcggtgcaagaaaacattatattcggtgtttcctatgtcgtcgcggttctatctagttacgcgttaaaccaactagaa

SEQ ID NO: 1137 - RNA, 168 nt, synthetic construct
  source 1..168: mol_type = other RNA
gttcatcataggaaacaccaagtttaagagctagaaatagcaagtttaaataaggctagtccgttatcagcgtgaaaacgcggcaccgagtcggtgcaagaaaatattatattcggtgtttcctatgtcttcgcggttctatctagttacgcgttaaaccaactagaa

SEQ ID NO: 1138 - RNA, 168 nt, synthetic construct
  source 1..168: mol_type = other RNA
gttcatcataggaaacaccaagttttagagctagaaatagcaagttaaaataaggctagtccgttatcgacttgaaaaagtcgcaccgagtcggtgcaagaaaatatcatcttcggtgtttcctatgtcgtcgcggttctatctagttacgcgttaaaccaactagaa

SEQ ID NO: 1139 - RNA, 168 nt, synthetic construct
  source 1..168: mol_type = other RNA
gttcatcataggaaacaccaagtttaagagctagaaatagcaagtttaaataaggctagtccgttatcagcgtgaaaacgcggcaccgagtcggtgcaagaaaatatcatcttcggtgtttcctatgtcatcgcggttctatctagttacgcgttaaaccaactagaa

SEQ ID NO: 1140 - RNA, 168 nt, synthetic construct
  source 1..168: mol_type = other RNA
gttcatcataggaaacaccaagtttaagagctagaaatagcaagtttaaataaggctagtccgttatcagcgtgaaaacgcggcaccgagtcggtgcaagaaaacatcatcttcggtgtttcctatgtcttcgcggttctatctagttacgcgttaaaccaactagaa

SEQ ID NO: 1141 - RNA, 168 nt, synthetic construct
  source 1..168: mol_type = other RNA
gttcatcataggaaacaccaagttttagagctagaaatagcaagttaaaataaggctagtccgttatcaacttgaaaaagtggcaccgagtcggtgcaagaaaacatcatcttcggtgtttcctatgtcgtcgcggttctatctagttacgcgttaaaccaactagaa

SEQ ID NO: 1142 - RNA, 168 nt, synthetic construct
  source 1..168: mol_type = other RNA
gttcatcataggaaacaccaagtttaagagctagaaatagcaagtttaaataaggctagtccgttatcagcgtgaaaacgcggcaccgagtcggtgcaagaaaacataatctttggtgtttcctatgtcctcgcggttctatctagttacgcgttaaaccaactagaa

SEQ ID NO: 1143 - RNA, 168 nt, synthetic construct
  source 1..168: mol_type = other RNA
gttcatcataggaaacaccaagtttaagagctagaaatagcaagtttaaataaggctagtccgttatcagcgtgaaaacgcggcaccgagtcggtgcaagaaaacatcatattcggtgtttcctatgtactcgcggttctatctagttacgcgttaaaccaactagaa

SEQ ID NO: 1144 - RNA, 168 nt, synthetic construct
  source 1..168: mol_type = other RNA
gttcatcataggaaacaccaagtttaagagctagaaatagcaagtttaaataaggctagtccgttatcagcgtgaaaacgcggcaccgagtcggtgcaagaaaatatcatctttggtgtttcctatgtactcgcggttctatctagttacgcgttaaaccaactagaa

SEQ ID NO: 1145 - RNA, 168 nt, synthetic construct
  source 1..168: mol_type = other RNA
gttcatcataggaaacaccaagttttagagctagaaatagcaagttaaaataaggctagtccgttatcaacttgaaaaagtggcaccgagtcggtgcaagaaaatatcatcttcggtgtttcctatgtcctcgcggttctatctagttacgcgttaaaccaactagaa

SEQ ID NO: 1146 - RNA, 168 nt, synthetic construct
  source 1..168: mol_type = other RNA
gttcatcataggaaacaccaagtttaagagctagaaatagcaagtttaaataaggctagtccgttatcagcgtgaaaacgcggcaccgagtcggtgcaagaaaatatcatatttggtgtttcctatgtcctcgcggttctatctagttacgcgttaaaccaactagaa

SEQ ID NO: 1147 - RNA, 168 nt, synthetic construct
  source 1..168: mol_type = other RNA
gttcatcataggaaacaccaagtttaagagctagaaatagcaagtttaaataaggctagtccgttatcagcgtgaaaacgcggcaccgagtcggtgcaagaaaacattatatttggtgtttcctatgtcgtcgcggttctatctagttacgcgttaaaccaactagaa

SEQ ID NO: 1148 - RNA, 168 nt, synthetic construct
  source 1..168: mol_type = other RNA
gttcatcataggaaacaccaagtttaagagctagaaatagcaagtttaaataaggctagtccgttatcagcgtgaaaacgcggcaccgagtcggtgcaagaaaatattatatttggtgtttcctatgtcctcgcggttctatctagttacgcgttaaaccaactagaa

SEQ ID NO: 1149 - RNA, 168 nt, synthetic construct
  source 1..168: mol_type = other RNA
gttcatcataggaaacaccaagttttagagctagaaatagcaagttaaaataaggctagtccgttatcgacttgaaaaagtcgcaccgagtcggtgcaagaaaacatcatatttggtgtttcctatgtcatcgcggttctatctagttacgcgttaaaccaactagaa

SEQ ID NO: 1150 - RNA, 168 nt, synthetic construct
  source 1..168: mol_type = other RNA
gttcatcataggaaacaccaagtttaagagctagaaatagcaagtttaaataaggctagtccgttatcagcgtgaaaacgcggcaccgagtcggtgcaagaaaatattatctttggtgtttcctatgtattcgcggttctatctagttacgcgttaaaccaactagaa

SEQ ID NO: 1151 - RNA, 168 nt, synthetic construct
  source 1..168: mol_type = other RNA
gttcatcataggaaacaccaagttttagagctagaaatagcaagttaaaataaggctagtccgttatcaacttgaaaaagtggcaccgagtcggtgcaagaaaacatcatatttggtgtttcctatgtcctcgcggttctatctagttacgcgttaaaccaactagaa

SEQ ID NO: 1152 - RNA, 168 nt, synthetic construct
  source 1..168: mol_type = other RNA
gttcatcataggaaacaccaagtttaagagctagaaatagcaagtttaaataaggctagtccgttatcagcgtgaaaacgcggcaccgagtcggtgcaagaaaacatcatctttggtgtttcctatgtcgtcgcggttctatctagttacgcgttaaaccaactagaa

SEQ ID NO: 1153 - RNA, 168 nt, synthetic construct
  source 1..168: mol_type = other RNA
gttcatcataggaaacaccaagtttaagagctagaaatagcaagtttaaataaggctagtccgttatcagcgtgaaaacgcggcaccgagtcggtgcaagaaaacattatcttcggtgtttcctatgtcctcgcggttctatctagttacgcgttaaaccaactagaa

SEQ ID NO: 1154 - RNA, 168 nt, synthetic construct
  source 1..168: mol_type = other RNA
gttcatcataggaaacaccaagtttaagagctagaaatagcaagtttaaataaggctagtccgttatcagcgtgaaaacgcggcaccgagtcggtgcaagaaaacattatctttggtgtttcctatgtcttcgcggttctatctagttacgcgttaaaccaactagaa

SEQ ID NO: 1155 - RNA, 168 nt, synthetic construct
  source 1..168: mol_type = other RNA
gttcatcataggaaacaccaagttttagagctagaaatagcaagttaaaataaggctagtccgttatcaacttgaaaaagtggcaccgagtcggtgcaagaaaacattatctttggtgtttcctatgtcgtcgcggttctatctagttacgcgttaaaccaactagaa

SEQ ID NO: 1156 - RNA, 168 nt, synthetic construct
  source 1..168: mol_type = other RNA
gttcatcataggaaacaccaagttttagagctagaaatagcaagttaaaataaggctagtccgttatcgacttgaaaaagtcgcaccgagtcggtgcaagaaaacattatctttggtgtttcctatgtattcgcggttctatctagttacgcgttaaaccaactagaa

SEQ ID NO: 1157 - RNA, 168 nt, synthetic construct
  source 1..168: mol_type = other RNA
gttcatcataggaaacaccaagtttaagagctagaaatagcaagtttaaataaggctagtccgttatcagcgtgaaaacgcggcaccgagtcggtgcaagaaaacatcatatttggtgtttcctatgtcatcgcggttctatctagttacgcgttaaaccaactagaa

SEQ ID NO: 1158 - RNA, 168 nt, synthetic construct
  source 1..168: mol_type = other RNA
gttcatcataggaaacaccaagtttaagagctagaaatagcaagtttaaataaggctagtccgttatcagcgtgaaaacgcggcaccgagtcggtgcaggagaacatcatcttcggtgtttcctatgtcgtcgcggttctatctagttacgcgttaaaccaactagaa

SEQ ID NO: 1159 - RNA, 168 nt, synthetic construct
  source 1..168: mol_type = other RNA
gttcatcataggaaacaccaagtttaagagctagaaatagcaagtttaaataaggctagtccgttatcagcgtgaaaacgcggcaccgagtcggtgcaggaaaacattatcttcggtgtttcctatgtcctcgcggttctatctagttacgcgttaaaccaactagaa

SEQ ID NO: 1160 - RNA, 168 nt, synthetic construct
  source 1..168: mol_type = other RNA
gtctgtatctatattcatcatgtttaagagcggggaaatccgcaagtttaaataaggctagtccgttatcagcgtgaaaacgcggcaccgagtcggtgccatctttggtgtttcctatgatgaatatagatcgcggttctatctagttacgcgttaaaccaactagaa

SEQ ID NO: 1161 - RNA, 168 nt, synthetic construct
  source 1..168: mol_type = other RNA
gtctgtatctatattcatcatgtttaagagcggggaaatccgcaagtttaaataaggctagtccgttatcagcgtgaaaacgcggcaccgagtcggtgctcatctttggtgtttcctatgatgaatatagacgcggttctatctagttacgcgttaaaccaactagaa

SEQ ID NO: 1162 - RNA, 168 nt, synthetic construct
  source 1..168: mol_type = other RNA
gtctgtatctatattcatcatgtttaagagcggggaaatccgcaagtttaaataaggctagtccgttatcagcgtgaaaacgcggcaccgagtcggtgcatcatctttggtgtttcctatgatgaatatagcgcggttctatctagttacgcgttaaaccaactagaa

SEQ ID NO: 1163 - RNA, 168 nt, synthetic construct
  source 1..168: mol_type = other RNA
gtctgtatctatattcatcatgtttaagagcggggaaatccgcaagtttaaataaggctagtccgttatcagcgtgaaaacgcggcaccgagtcggtgctatcatctttggtgtttcctatgatgaatatacgcggttctatctagttacgcgttaaaccaactagaa

SEQ ID NO: 1164 - RNA, 168 nt, synthetic construct
  source 1..168: mol_type = other RNA
gtctgtatctatattcatcatgtttaagagcggggaaatccgcaagtttaaataaggctagtccgttatcagcgtgaaaacgcggcaccgagtcggtgcatatcatctttggtgtttcctatgatgaatatcgcggttctatctagttacgcgttaaaccaactagaa

SEQ ID NO: 1165 - RNA, 168 nt, synthetic construct
  source 1..168: mol_type = other RNA
gttcatcataggaaacaccaagtttaagagcggggaaatccgcaagtttaaataaggctagtccgttatcagcgtgaaaacgcggcaccgagtcggtgcagaaaatatcatctttggtgtttcctatgatgcgcggttctatctagttacgcgttaaaccaactagaa

SEQ ID NO: 1166 - RNA, 168 nt, synthetic construct
  source 1..168: mol_type = other RNA
gttcatcataggaaacaccaagtttaagagcggggaaatccgcaagtttaaataaggctagtccgttatcagcgtgaaaacgcggcaccgagtcggtgcaagaaaatatcatctttggtgtttcctatgatcgcggttctatctagttacgcgttaaaccaactagaa

SEQ ID NO: 1167 - RNA, 168 nt, synthetic construct
  source 1..168: mol_type = other RNA
gttcatcataggaaacaccaagtttaagagcggggaaatccgcaagtttaaataaggctagtccgttatcagcgtgaaaacgcggcaccgagtcggtgcaaagaaaatatcatctttggtgtttcctatgacgcggttctatctagttacgcgttaaaccaactagaa

SEQ ID NO: 1168 - RNA, 168 nt, synthetic construct
  source 1..168: mol_type = other RNA
gttcatcataggaaacaccaagtttaagagcggggaaatccgcaagtttaaataaggctagtccgttatcagcgtgaaaacgcggcaccgagtcggtgctaaagaaaatatcatctttggtgtttcctatgcgcggttctatctagttacgcgttaaaccaactagaa

SEQ ID NO: 1169 - RNA, 168 nt, synthetic construct
  source 1..168: mol_type = other RNA
gttcatcataggaaacaccaagtttaagagcggggaaatccgcaagtttaaataaggctagtccgttatcagcgtgaaaacgcggcaccgagtcggtgcttaaagaaaatatcatctttggtgtttcctatcgcggttctatctagttacgcgttaaaccaactagaa

SEQ ID NO: 1170 - RNA, 168 nt, synthetic construct
  source 1..168: mol_type = other RNA
gttcatcataggaaacaccaagtttaagagcggggaaatccgcaagtttaaataaggctagtccgttatcagcgtgaaaacgcggcaccgagtcggtgcattaaagaaaatatcatctttggtgtttcctacgcggttctatctagttacgcgttaaaccaactagaa

SEQ ID NO: 1171 - RNA, 168 nt, synthetic construct
  source 1..168: mol_type = other RNA
gttcatcataggaaacaccaagtttaagagcggggaaatccgcaagtttaaataaggctagtccgttatcagcgtgaaaacgcggcaccgagtcggtgccattaaagaaaatatcatctttggtgtttcctcgcggttctatctagttacgcgttaaaccaactagaa

SEQ ID NO: 1172 - RNA, 168 nt, synthetic construct
  source 1..168: mol_type = other RNA
gttcatcataggaaacaccaagtttaagagcggggaaatccgcaagtttaaataaggctagtccgttatcagcgtgaaaacgcggcaccgagtcggtgcccattaaagaaaatatcatctttggtgtttcccgcggttctatctagttacgcgttaaaccaactagaa

SEQ ID NO: 1173 - RNA, 169 nt, synthetic construct
  source 1..169: mol_type = other RNA
gttcatcataggaaacaccaagttttagagctagaaatagcaagttaaaataaggctagtccgttatcaacttgaaaaagtggcaccgagtcggtgcaagaaaatatcatctttggtgtttcctatttcaatcgcggttctatctagttacgcgttaaaccaactagaa

SEQ ID NO: 1174 - RNA, 169 nt, synthetic construct
  source 1..169: mol_type = other RNA
gttcatcataggaaacaccaagttttagagctagaaatagcaagttaaaataaggctagtccgttatcaacttgaaaaagtggcaccgagtcggtgcaagaaaatatcatctttggtgtttcctatttcattcgcggttctatctagttacgcgttaaaccaactagaa

SEQ ID NO: 1175 - RNA, 169 nt, synthetic construct
  source 1..169: mol_type = other RNA
gtctgtatctatattcatcatgtttaagagctagaaatagcaagtttaaataaggctagtccgttatcagcgtgaaaacgcggcaccgagtcggtgctcatctttggtgtttcctatgatgaatatagacatcgcggttctatctagttacgcgttaaaccaactagaa

SEQ ID NO: 1176 - RNA, 169 nt, synthetic construct
  source 1..169: mol_type = other RNA
gaccattaaagaaaatatcatgtttaagagctagaaatagcaagtttaaataaggctagtccgttatcagcgtgaaaacgcggcaccgagtcggtgcataggaaacaccaaagatgatattttctttaaattcgcggttctatctagttacgcgttaaaccaactagaa

SEQ ID NO: 1177 - RNA, 169 nt, synthetic construct
  source 1..169: mol_type = other RNA
gaccattaaagaaaatatcatgtttaagagctagaaatagcaagtttaaataaggctagtccgttatcagcgtgaaaacgcggcaccgagtcggtgcggaaacaccaaagatgatattttctttaatgctctcgcggttctatctagttacgcgttaaaccaactagaa

SEQ ID NO: 1178 - RNA, 169 nt, synthetic construct
  source 1..169: mol_type = other RNA
gaccattaaagaaaatatcatgtttaagagctagaaatagcaagtttaaataaggctagtccgttatcagcgtgaaaacgcggcaccgagtcggtgcatcataggaaacaccaaagatgatattttcaaggccgcggttctatctagttacgcgttaaaccaactagaa

SEQ ID NO: 1179 - RNA, 169 nt, synthetic construct
  source 1..169: mol_type = other RNA
gaccattaaagaaaatatcatgtttaagagcggggaaatccgcaagtttaaataaggctagtccgttatcagcgtgaaaacgcggcaccgagtcggtgcaacaccaaagataatattttctttaatggattccgcggttctatctagttacgcgttaaaccaactagaa

SEQ ID NO: 1180 - RNA, 169 nt, synthetic construct
  source 1..169: mol_type = other RNA
gaccattaaagaaaatatcatgtttaagagcggggaaatccgcaagtttaaataaggctagtccgttatcagcgtgaaaacgcggcaccgagtcggtgcaacaccaaagatgatattttctttaatggagaccgcggttctatctagttacgcgttaaaccaactagaa

SEQ ID NO: 1181 - RNA, 169 nt, synthetic construct
  source 1..169: mol_type = other RNA
gaccattaaagaaaatatcatgtttaagagcggggaaatccgcaagtttaaataaggctagtccgttatcagcgtgaaaacgcggcaccgagtcggtgcaacaccaaagattatattttctttaatggattccgcggttctatctagttacgcgttaaaccaactagaa

SEQ ID NO: 1182 - RNA, 169 nt, synthetic construct
  source 1..169: mol_type = other RNA
gaccattaaagaaaatatcatgtttaagagcggggaaatccgcaagtttaaataaggctagtccgttatcagcgtgaaaacgcggcaccgagtcggtgcaacaccgaagatgatattttctttaatggaggccgcggttctatctagttacgcgttaaaccaactagaa

SEQ ID NO: 1183 - RNA, 169 nt, synthetic construct
  source 1..169: mol_type = other RNA
gaccattaaagaaaatatcatgtttaagagcggggaaatccgcaagtttaaataaggctagtccgttatcagcgtgaaaacgcggcaccgagtcggtgcaaccccaaagatgatattttctttaatggatgccgcggttctatctagttacgcgttaaaccaactagaa

SEQ ID NO: 1184 - RNA, 169 nt, synthetic construct
  source 1..169: mol_type = other RNA
gaccattaaagaaaatatcatgtttaagagcggggaaatccgcaagtttaaataaggctagtccgttatcagcgtgaaaacgcggcaccgagtcggtgcaacgccaaagatgatattttctttaatggattccgcggttctatctagttacgcgttaaaccaactagaa

SEQ ID NO: 1185 - RNA, 169 nt, synthetic construct
  source 1..169: mol_type = other RNA
gaccattaaagaaaatatcatgtttaagagcggggaaatccgcaagtttaaataaggctagtccgttatcagcgtgaaaacgcggcaccgagtcggtgcaactccaaagatgatattttctttaatggcttccgcggttctatctagttacgcgttaaaccaactagaa

SEQ ID NO: 1186 - RNA, 169 nt, synthetic construct
  source 1..169: mol_type = other RNA
gaccattaaagaaaatatcatgtttaagagcggggaaatccgcaagtttaaataaggctagtccgttatcagcgtgaaaacgcggcaccgagtcggtgccacaccaaagatgatattttctttaatggattccgcggttctatctagttacgcgttaaaccaactagaa

SEQ ID NO: 1187 - RNA, 169 nt, synthetic construct
  source 1..169: mol_type = other RNA
gaccattaaagaaaatatcatgtttaagagcggggaaatccgcaagtttaaataaggctagtccgttatcagcgtgaaaacgcggcaccgagtcggtgcgacaccaaagatgatattttctttaatggaaaccgcggttctatctagttacgcgttaaaccaactagaa

SEQ ID NO: 1188 - RNA, 169 nt, synthetic construct
  source 1..169: mol_type = other RNA
gaccattaaagaaaatatcatgtttaagagcggggaaatccgcaagtttaaataaggctagtccgttatcagcgtgaaaacgcggcaccgagtcggtgctacaccaaagatgatattttctttaatggaaaccgcggttctatctagttacgcgttaaaccaactagaa

SEQ ID NO: 1189 - RNA, 169 nt, synthetic construct
  source 1..169: mol_type = other RNA
gtctgtatctatattcatcatgtttaagagcggggaaatccgcaagtttaaataaggctagtccgttatcagcgtgaaaacgcggcaccgagtcggtgccatctttggtgtttcctatgatgaatatagatacgcggttctatctagttacgcgttaaaccaactagaa

SEQ ID NO: 1190 - RNA, 169 nt, synthetic construct
  source 1..169: mol_type = other RNA
gtctgtatctatattcatcatgtttaagagcggggaaatccgcaagtttaaataaggctagtccgttatcagcgtgaaaacgcggcaccgagtcggtgctcatctttggtgtttcctatgatgaatatagatcgcggttctatctagttacgcgttaaaccaactagaa

SEQ ID NO: 1191 - RNA, 169 nt, synthetic construct
  source 1..169: mol_type = other RNA
gtctgtatctatattcatcatgtttaagagcggggaaatccgcaagtttaaataaggctagtccgttatcagcgtgaaaacgcggcaccgagtcggtgcatcatctttggtgtttcctatgatgaatatagacgcggttctatctagttacgcgttaaaccaactagaa

SEQ ID NO: 1192 - RNA, 169 nt, synthetic construct
  source 1..169: mol_type = other RNA
gtctgtatctatattcatcatgtttaagagcggggaaatccgcaagtttaaataaggctagtccgttatcagcgtgaaaacgcggcaccgagtcggtgctatcatctttggtgtttcctatgatgaatatagcgcggttctatctagttacgcgttaaaccaactagaa

SEQ ID NO: 1193 - RNA, 169 nt, synthetic construct
  source 1..169: mol_type = other RNA
gtctgtatctatattcatcatgtttaagagcggggaaatccgcaagtttaaataaggctagtccgttatcagcgtgaaaacgcggcaccgagtcggtgcatatcatctttggtgtttcctatgatgaatatacgcggttctatctagttacgcgttaaaccaactagaa

SEQ ID NO: 1194 - RNA, 169 nt, synthetic construct
  source 1..169: mol_type = other RNA
gtctgtatctatattcatcatgtttaagagcggggaaatccgcaagtttaaataaggctagtccgttatcagcgtgaaaacgcggcaccgagtcggtgcaatatcatctttggtgtttcctatgatgaatatcgcggttctatctagttacgcgttaaaccaactagaa

SEQ ID NO: 1195 - RNA, 169 nt, synthetic construct
  source 1..169: mol_type = other RNA
gttcatcataggaaacaccaagtttaagagcggggaaatccgcaagtttaaataaggctagtccgttatcagcgtgaaaacgcggcaccgagtcggtgcaagaaaatatcatctttggtgtttcctatgatgcgcggttctatctagttacgcgttaaaccaactagaa

SEQ ID NO: 1196 - RNA, 169 nt, synthetic construct
  source 1..169: mol_type = other RNA
gttcatcataggaaacaccaagtttaagagcggggaaatccgcaagtttaaataaggctagtccgttatcagcgtgaaaacgcggcaccgagtcggtgcaaagaaaatatcatctttggtgtttcctatgatcgcggttctatctagttacgcgttaaaccaactagaa

SEQ ID NO: 1197 - RNA, 169 nt, synthetic construct
  source 1..169: mol_type = other RNA
gttcatcataggaaacaccaagtttaagagcggggaaatccgcaagtttaaataaggctagtccgttatcagcgtgaaaacgcggcaccgagtcggtgctaaagaaaatatcatctttggtgtttcctatgacgcggttctatctagttacgcgttaaaccaactagaa

SEQ ID NO: 1198 - RNA, 169 nt, synthetic construct
  source 1..169: mol_type = other RNA
gttcatcataggaaacaccaagtttaagagcggggaaatccgcaagtttaaataaggctagtccgttatcagcgtgaaaacgcggcaccgagtcggtgcttaaagaaaatatcatctttggtgtttcctatgcgcggttctatctagttacgcgttaaaccaactagaa

SEQ ID NO: 1199 - RNA, 169 nt, synthetic construct
  source 1..169: mol_type = other RNA
gttcatcataggaaacaccaagtttaagagcggggaaatccgcaagtttaaataaggctagtccgttatcagcgtgaaaacgcggcaccgagtcggtgcattaaagaaaatatcatctttggtgtttcctatcgcggttctatctagttacgcgttaaaccaactagaa

SEQ ID NO: 1200 - RNA, 169 nt, synthetic construct
  source 1..169: mol_type = other RNA
gttcatcataggaaacaccaagtttaagagcggggaaatccgcaagtttaaataaggctagtccgttatcagcgtgaaaacgcggcaccgagtcggtgccattaaagaaaatatcatctttggtgtttcctacgcggttctatctagttacgcgttaaaccaactagaa

SEQ ID NO: 1201 - RNA, 169 nt, synthetic construct
  source 1..169: mol_type = other RNA
gttcatcataggaaacaccaagtttaagagcggggaaatccgcaagtttaaataaggctagtccgttatcagcgtgaaaacgcggcaccgagtcggtgcccattaaagaaaatatcatctttggtgtttcctcgcggttctatctagttacgcgttaaaccaactagaa

SEQ ID NO: 1202 - RNA, 169 nt, synthetic construct
  source 1..169: mol_type = other RNA
gttcatcataggaaacaccaagtttaagagcggggaaatccgcaagtttaaataaggctagtccgttatcagcgtgaaaacgcggcaccgagtcggtgcaccattaaagaaaatatcatctttggtgtttcccgcggttctatctagttacgcgttaaaccaactagaa

SEQ ID NO: 1203 - RNA, 170 nt, synthetic construct
  source 1..170: mol_type = other RNA
gttcatcataggaaacaccaagtttaagagcggggaaatccgcaagtttaaataaggctagtccgttatcagcgtgaaaacgcggcaccgagtcggtgcaagaaaatatcatcttcggtgtttcctatgtcttcgcggttctatctagttacgcgttaaaccaactagaa

SEQ ID NO: 1204 - RNA, 170 nt, synthetic construct
  source 1..170: mol_type = other RNA
gttcatcataggaaacaccaagtttaagagcggggaaatccgcaagtttaaataaggctagtccgttatcagcgtgaaaacgcggcaccgagtcggtgcaagaaaacatcatatttggtgtttcctatgtactcgcggttctatctagttacgcgttaaaccaactagaa

SEQ ID NO: 1205 - RNA, 170 nt, synthetic construct
  source 1..170: mol_type = other RNA
gttcatcataggaaacaccaagtttaagagcggggaaatccgcaagtttaaataaggctagtccgttatcagcgtgaaaacgcggcaccgagtcggtgcaagaaaacatcatcttcggtgtttcctatgtactcgcggttctatctagttacgcgttaaaccaactagaa

SEQ ID NO: 1206 - RNA, 170 nt, synthetic construct
  source 1..170: mol_type = other RNA
gttcatcataggaaacaccaagtttaagagcggggaaatccgcaagtttaaataaggctagtccgttatcagcgtgaaaacgcggcaccgagtcggtgcaagaaaacattatctttggtgtttcctatgtcttcgcggttctatctagttacgcgttaaaccaactagaa

SEQ ID NO: 1207 - RNA, 170 nt, synthetic construct
  source 1..170: mol_type = other RNA
gtctgtatctatattcatcatgtttaagagcggggaaatccgcaagtttaaataaggctagtccgttatcagcgtgaaaacgcggcaccgagtcggtgccatctttggtgtttcctatgatgaatatagataccgcggttctatctagttacgcgttaaaccaactagaa

SEQ ID NO: 1208 - RNA, 170 nt, synthetic construct
  source 1..170: mol_type = other RNA
gtctgtatctatattcatcatgtttaagagcggggaaatccgcaagtttaaataaggctagtccgttatcagcgtgaaaacgcggcaccgagtcggtgctcatctttggtgtttcctatgatgaatatagatacgcggttctatctagttacgcgttaaaccaactagaa

SEQ ID NO: 1209 - RNA, 170 nt, synthetic construct
  source 1..170: mol_type = other RNA
gtctgtatctatattcatcatgtttaagagcggggaaatccgcaagtttaaataaggctagtccgttatcagcgtgaaaacgcggcaccgagtcggtgcatcatctttggtgtttcctatgatgaatatagatcgcggttctatctagttacgcgttaaaccaactagaa

SEQ ID NO: 1210 - RNA, 170 nt, synthetic construct
  source 1..170: mol_type = other RNA
gtctgtatctatattcatcatgtttaagagcggggaaatccgcaagtttaaataaggctagtccgttatcagcgtgaaaacgcggcaccgagtcggtgctatcatctttggtgtttcctatgatgaatatagacgcggttctatctagttacgcgttaaaccaactagaa

SEQ ID NO: 1211 - RNA, 170 nt, synthetic construct
  source 1..170: mol_type = other RNA
gtctgtatctatattcatcatgtttaagagcggggaaatccgcaagtttaaataaggctagtccgttatcagcgtgaaaacgcggcaccgagtcggtgcatatcatctttggtgtttcctatgatgaatatagcgcggttctatctagttacgcgttaaaccaactagaa

SEQ ID NO: 1212 - RNA, 170 nt, synthetic construct
  source 1..170: mol_type = other RNA
gtctgtatctatattcatcatgtttaagagcggggaaatccgcaagtttaaataaggctagtccgttatcagcgtgaaaacgcggcaccgagtcggtgcaatatcatctttggtgtttcctatgatgaatatacgcggttctatctagttacgcgttaaaccaactagaa

SEQ ID NO: 1213 - RNA, 170 nt, synthetic construct
  source 1..170: mol_type = other RNA
gtctgtatctatattcatcatgtttaagagcggggaaatccgcaagtttaaataaggctagtccgttatcagcgtgaaaacgcggcaccgagtcggtgcaaatatcatctttggtgtttcctatgatgaatatcgcggttctatctagttacgcgttaaaccaactagaa

SEQ ID NO: 1214 - RNA, 170 nt, synthetic construct
  source 1..170: mol_type = other RNA
gttcatcataggaaacaccaagtttaagagcggggaaatccgcaagtttaaataaggctagtccgttatcagcgtgaaaacgcggcaccgagtcggtgcaaagaaaatatcatctttggtgtttcctatgatgcgcggttctatctagttacgcgttaaaccaactagaa

SEQ ID NO: 1215 - RNA, 170 nt, synthetic construct
  source 1..170: mol_type = other RNA
gttcatcataggaaacaccaagtttaagagcggggaaatccgcaagtttaaataaggctagtccgttatcagcgtgaaaacgcggcaccgagtcggtgctaaagaaaatatcatctttggtgtttcctatgatcgcggttctatctagttacgcgttaaaccaactagaa

SEQ ID NO: 1216 - RNA, 170 nt, synthetic construct
  source 1..170: mol_type = other RNA
gttcatcataggaaacaccaagtttaagagcggggaaatccgcaagtttaaataaggctagtccgttatcagcgtgaaaacgcggcaccgagtcggtgcttaaagaaaatatcatctttggtgtttcctatgacgcggttctatctagttacgcgttaaaccaactagaa

SEQ ID NO: 1217 - RNA, 170 nt, synthetic construct
  source 1..170: mol_type = other RNA
gttcatcataggaaacaccaagtttaagagcggggaaatccgcaagtttaaataaggctagtccgttatcagcgtgaaaacgcggcaccgagtcggtgcattaaagaaaatatcatctttggtgtttcctatgcgcggttctatctagttacgcgttaaaccaactagaa

SEQ ID NO: 1218 - RNA, 170 nt, synthetic construct
  source 1..170: mol_type = other RNA
gttcatcataggaaacaccaagtttaagagcggggaaatccgcaagtttaaataaggctagtccgttatcagcgtgaaaacgcggcaccgagtcggtgccattaaagaaaatatcatctttggtgtttcctatcgcggttctatctagttacgcgttaaaccaactagaa

SEQ ID NO: 1219 - RNA, 170 nt, synthetic construct
  source 1..170: mol_type = other RNA
gttcatcataggaaacaccaagtttaagagcggggaaatccgcaagtttaaataaggctagtccgttatcagcgtgaaaacgcggcaccgagtcggtgcccattaaagaaaatatcatctttggtgtttcctacgcggttctatctagttacgcgttaaaccaactagaa

SEQ ID NO: 1220 - RNA, 170 nt, synthetic construct
  source 1..170: mol_type = other RNA
gttcatcataggaaacaccaagtttaagagcggggaaatccgcaagtttaaataaggctagtccgttatcagcgtgaaaacgcggcaccgagtcggtgcaccattaaagaaaatatcatctttggtgtttcctcgcggttctatctagttacgcgttaaaccaactagaa

SEQ ID NO: 1221 - RNA, 170 nt, synthetic construct
  source 1..170: mol_type = other RNA
gttcatcataggaaacaccaagtttaagagcggggaaatccgcaagtttaaataaggctagtccgttatcagcgtgaaaacgcggcaccgagtcggtgccaccattaaagaaaatatcatctttggtgtttcccgcggttctatctagttacgcgttaaaccaactagaa

SEQ ID NO: 1222 - RNA, 171 nt, synthetic construct
  source 1..171: mol_type = other RNA
gttcatcataggaaacaccaagttttagagctagaaatagcaagttaaaataaggctagtccgttatcaacttgaaaaagtggcaccgagtcggtgcaagaaaatatcatctttggtgtttcctatttacatctcgcggttctatctagttacgcgttaaaccaactagaa

SEQ ID NO: 1223 - RNA, 171 nt, synthetic construct
  source 1..171: mol_type = other RNA
gttcatcataggaaacaccaagttttagagctagaaatagcaagttaaaataaggctagtccgttatcaacttgaaaaagtggcaccgagtcggtgcaagaaaatatcatctttggtgtttcctatttcaagctcgcggttctatctagttacgcgttaaaccaactagaa

SEQ ID NO: 1224 - RNA, 171 nt, synthetic construct
  source 1..171: mol_type = other RNA
gtctgtatctatattcatcatgtttaagagctagaaatagcaagtttaaataaggctagtccgttatcagcgtgaaaacgcggcaccgagtcggtgcaatatcatctttggtgtttcctatgatgaatatacgtcgcggttctatctagttacgcgttaaaccaactagaa

SEQ ID NO: 1225 - RNA, 171 nt, synthetic construct
  source 1..171: mol_type = other RNA
gaccattaaagaaaatatcatgtttaagagctagaaatagcaagtttaaataaggctagtccgttatcagcgtgaaaacgcggcaccgagtcggtgcatcataggaaacaccaaagatgatattttcttacgctcgcggttctatctagttacgcgttaaaccaactagaa

SEQ ID NO: 1226 - RNA, 171 nt, synthetic construct
  source 1..171: mol_type = other RNA
gtctgtatctatattcatcatgtttaagagcggggaaatccgcaagtttaaataaggctagtccgttatcagcgtgaaaacgcggcaccgagtcggtgccatctttggtgtttcctatgatgaatatagatacacgcggttctatctagttacgcgttaaaccaactagaa

SEQ ID NO: 1227 - RNA, 171 nt, synthetic construct
  source 1..171: mol_type = other RNA
gtctgtatctatattcatcatgtttaagagcggggaaatccgcaagtttaaataaggctagtccgttatcagcgtgaaaacgcggcaccgagtcggtgctcatctttggtgtttcctatgatgaatatagataccgcggttctatctagttacgcgttaaaccaactagaa

SEQ ID NO: 1228 - RNA, 171 nt, synthetic construct
  source 1..171: mol_type = other RNA
gtctgtatctatattcatcatgtttaagagcggggaaatccgcaagtttaaataaggctagtccgttatcagcgtgaaaacgcggcaccgagtcggtgcatcatctttggtgtttcctatgatgaatatagatacgcggttctatctagttacgcgttaaaccaactagaa

SEQ ID NO: 1229 - RNA, 171 nt, synthetic construct
  source 1..171: mol_type = other RNA
gtctgtatctatattcatcatgtttaagagcggggaaatccgcaagtttaaataaggctagtccgttatcagcgtgaaaacgcggcaccgagtcggtgctatcatctttggtgtttcctatgatgaatatagatcgcggttctatctagttacgcgttaaaccaactagaa

SEQ ID NO: 1230 - RNA, 171 nt, synthetic construct
  source 1..171: mol_type = other RNA
gtctgtatctatattcatcatgtttaagagcggggaaatccgcaagtttaaataaggctagtccgttatcagcgtgaaaacgcggcaccgagtcggtgcatatcatctttggtgtttcctatgatgaatatagacgcggttctatctagttacgcgttaaaccaactagaa

SEQ ID NO: 1231 - RNA, 171 nt, synthetic construct
  source 1..171: mol_type = other RNA
gtctgtatctatattcatcatgtttaagagcggggaaatccgcaagtttaaataaggctagtccgttatcagcgtgaaaacgcggcaccgagtcggtgcaatatcatctttggtgtttcctatgatgaatatagcgcggttctatctagttacgcgttaaaccaactagaa

SEQ ID NO: 1232 - RNA, 171 nt, synthetic construct
  source 1..171: mol_type = other RNA
gtctgtatctatattcatcatgtttaagagcggggaaatccgcaagtttaaataaggctagtccgttatcagcgtgaaaacgcggcaccgagtcggtgcaaatatcatctttggtgtttcctatgatgaatatacgcggttctatctagttacgcgttaaaccaactagaa

SEQ ID NO: 1233 - RNA, 171 nt, synthetic construct
  source 1..171: mol_type = other RNA
gtctgtatctatattcatcatgtttaagagcggggaaatccgcaagtttaaataaggctagtccgttatcagcgtgaaaacgcggcaccgagtcggtgcaaaatatcatctttggtgtttcctatgatgaatatcgcggttctatctagttacgcgttaaaccaactagaa

SEQ ID NO: 1234 - RNA, 171 nt, synthetic construct
  source 1..171: mol_type = other RNA
gttcatcataggaaacaccaagtttaagagcggggaaatccgcaagtttaaataaggctagtccgttatcagcgtgaaaacgcggcaccgagtcggtgctaaagaaaatatcatctttggtgtttcctatgatgcgcggttctatctagttacgcgttaaaccaactagaa

SEQ ID NO: 1235 - RNA, 171 nt, synthetic construct
  source 1..171: mol_type = other RNA
gttcatcataggaaacaccaagtttaagagcggggaaatccgcaagtttaaataaggctagtccgttatcagcgtgaaaacgcggcaccgagtcggtgcttaaagaaaatatcatctttggtgtttcctatgatcgcggttctatctagttacgcgttaaaccaactagaa

SEQ ID NO: 1236 - RNA, 171 nt, synthetic construct
  source 1..171: mol_type = other RNA
gttcatcataggaaacaccaagtttaagagcggggaaatccgcaagtttaaataaggctagtccgttatcagcgtgaaaacgcggcaccgagtcggtgcattaaagaaaatatcatctttggtgtttcctatgacgcggttctatctagttacgcgttaaaccaactagaa

SEQ ID NO: 1237 - RNA, 171 nt, synthetic construct
  source 1..171: mol_type = other RNA
gttcatcataggaaacaccaagtttaagagcggggaaatccgcaagtttaaataaggctagtccgttatcagcgtgaaaacgcggcaccgagtcggtgccattaaagaaaatatcatctttggtgtttcctatgcgcggttctatctagttacgcgttaaaccaactagaa

SEQ ID NO: 1238 - RNA, 171 nt, synthetic construct
  source 1..171: mol_type = other RNA
gttcatcataggaaacaccaagtttaagagcggggaaatccgcaagtttaaataaggctagtccgttatcagcgtgaaaacgcggcaccgagtcggtgcccattaaagaaaatatcatctttggtgtttcctatcgcggttctatctagttacgcgttaaaccaactagaa

SEQ ID NO: 1239 - RNA, 171 nt, synthetic construct
  source 1..171: mol_type = other RNA
gttcatcataggaaacaccaagtttaagagcggggaaatccgcaagtttaaataaggctagtccgttatcagcgtgaaaacgcggcaccgagtcggtgcaccattaaagaaaatatcatctttggtgtttcctacgcggttctatctagttacgcgttaaaccaactagaa

SEQ ID NO: 1240 - RNA, 171 nt, synthetic construct
  source 1..171: mol_type = other RNA
gttcatcataggaaacaccaagtttaagagcggggaaatccgcaagtttaaataaggctagtccgttatcagcgtgaaaacgcggcaccgagtcggtgccaccattaaagaaaatatcatctttggtgtttcctcgcggttctatctagttacgcgttaaaccaactagaa

SEQ ID NO: 1241 - RNA, 171 nt, synthetic construct
  source 1..171: mol_type = other RNA
gttcatcataggaaacaccaagtttaagagcggggaaatccgcaagtttaaataaggctagtccgttatcagcgtgaaaacgcggcaccgagtcggtgcgcaccattaaagaaaatatcatctttggtgtttcccgcggttctatctagttacgcgttaaaccaactagaa

SEQ ID NO: 1242 - RNA, 172 nt, synthetic construct
  source 1..172: mol_type = other RNA
gtctgtatctatattcatcatgtttaagagctagaaatagcaagtttaaataaggctagtccgttatcagcgtgaaaacgcggcaccgagtcggtgctcatctttggtgtttcctatgatgaatatagataaattcgcggttctatctagttacgcgttaaaccaactagaa

SEQ ID NO: 1243 - RNA, 172 nt, synthetic construct
  source 1..172: mol_type = other RNA
gaccattaaagaaaatatcatgtttaagagctagaaatagcaagtttaaataaggctagtccgttatcagcgtgaaaacgcggcaccgagtcggtgcatcataggaaacaccaaagatgatattttctttagactcgcggttctatctagttacgcgttaaaccaactagaa

SEQ ID NO: 1244 - RNA, 172 nt, synthetic construct
  source 1..172: mol_type = other RNA
gaccattaaagaaaatatcatgtttaagagctagaaatagcaagtttaaataaggctagtccgttatcagcgtgaaaacgcggcaccgagtcggtgcataggaaacaccaaagatgatattttctttaatgaattcgcggttctatctagttacgcgttaaaccaactagaa

SEQ ID NO: 1245 - RNA, 172 nt, synthetic construct
  source 1..172: mol_type = other RNA
gaccattaaagaaaatatcatgtttaagagctagaaatagcaagtttaaataaggctagtccgttatcagcgtgaaaacgcggcaccgagtcggtgcttcatcataggaaacaccaaagatgatattttcaatttcgcggttctatctagttacgcgttaaaccaactagaa

SEQ ID NO: 1246 - RNA, 172 nt, synthetic construct
  source 1..172: mol_type = other RNA
gttcatcataggaaacaccaagtttaagagctagaaatagcaagtttaaataaggctagtccgttatcagcgtgaaaacgcggcaccgagtcggtgcattaaagaaaacataatattcggtgtttcctatgtcttcgcggttctatctagttacgcgttaaaccaactagaa

SEQ ID NO: 1247 - RNA, 172 nt, synthetic construct
  source 1..172: mol_type = other RNA
gttcatcataggaaacaccaagtttaagagctagaaatagcaagtttaaataaggctagtccgttatcagcgtgaaaacgcggcaccgagtcggtgcattaaagaaaatataatcttcggtgtttcctatgtattcgcggttctatctagttacgcgttaaaccaactagaa

SEQ ID NO: 1248 - RNA, 172 nt, synthetic construct
  source 1..172: mol_type = other RNA
gttcatcataggaaacaccaagtttaagagctagaaatagcaagtttaaataaggctagtccgttatcagcgtgaaaacgcggcaccgagtcggtgcattaaagagaatataatcttcggtgtttcctatgtcgtcgcggttctatctagttacgcgttaaaccaactagaa

SEQ ID NO: 1249 - RNA, 172 nt, synthetic construct
  source 1..172: mol_type = other RNA
gttcatcataggaaacaccaagtttaagagctagaaatagcaagtttaaataaggctagtccgttatcagcgtgaaaacgcggcaccgagtcggtgcattaaagaaaatataatattcggtgtttcctatgtcgtcgcggttctatctagttacgcgttaaaccaactagaa

SEQ ID NO: 1250 - RNA, 172 nt, synthetic construct
  source 1..172: mol_type = other RNA
gttcatcataggaaacaccaagtttaagagctagaaatagcaagtttaaataaggctagtccgttatcagcgtgaaaacgcggcaccgagtcggtgcataaaagaaaatataatctttggtgtttcctatgtacccgcggttctatctagttacgcgttaaaccaactagaa

SEQ ID NO: 1251 - RNA, 172 nt, synthetic construct
  source 1..172: mol_type = other RNA
gttcatcataggaaacaccaagtttaagagctagaaatagcaagtttaaataaggctagtccgttatcagcgtgaaaacgcggcaccgagtcggtgcattaaagaaaacataatatttggtgtttcctatgtcctcgcggttctatctagttacgcgttaaaccaactagaa

SEQ ID NO: 1252 - RNA, 172 nt, synthetic construct
  source 1..172: mol_type = other RNA
gttcatcataggaaacaccaagtttaagagctagaaatagcaagtttaaataaggctagtccgttatcagcgtgaaaacgcggcaccgagtcggtgcattaaagaaaacataatcttcggtgtttcctatgtcttcgcggttctatctagttacgcgttaaaccaactagaa

SEQ ID NO: 1253 - RNA, 172 nt, synthetic construct
  source 1..172: mol_type = other RNA
gttcatcataggaaacaccaagtttaagagctagaaatagcaagtttaaataaggctagtccgttatcagcgtgaaaacgcggcaccgagtcggtgcattaaagaaaacattatattcggtgtttcctatgtcctcgcggttctatctagttacgcgttaaaccaactagaa

SEQ ID NO: 1254 - RNA, 172 nt, synthetic construct
  source 1..172: mol_type = other RNA
gttcatcataggaaacaccaagtttaagagctagaaatagcaagtttaaataaggctagtccgttatcagcgtgaaaacgcggcaccgagtcggtgcattaaagaaaatattatcttcggtgtttcctatgtattcgcggttctatctagttacgcgttaaaccaactagaa

SEQ ID NO: 1255 - RNA, 172 nt, synthetic construct
  source 1..172: mol_type = other RNA
gttcatcataggaaacaccaagtttaagagctagaaatagcaagtttaaataaggctagtccgttatcagcgtgaaaacgcggcaccgagtcggtgcattaaagaaaatataatctttggtgtttcctatgtactcgcggttctatctagttacgcgttaaaccaactagaa

SEQ ID NO: 1256 - RNA, 172 nt, synthetic construct
  source 1..172: mol_type = other RNA
gttcatcataggaaacaccaagtttaagagctagaaatagcaagtttaaataaggctagtccgttatcagcgtgaaaacgcggcaccgagtcggtgcattaaagagaatataatatttggtgtttcctatgtacccgcggttctatctagttacgcgttaaaccaactagaa

SEQ ID NO: 1257 - RNA, 172 nt, synthetic construct
  source 1..172: mol_type = other RNA
gttcatcataggaaacaccaagtttaagagctagaaatagcaagtttaaataaggctagtccgttatcagcgtgaaaacgcggcaccgagtcggtgcattaaagaaaatataatatttggtgtttcctatgtctccgcggttctatctagttacgcgttaaaccaactagaa

SEQ ID NO: 1258 - RNA, 172 nt, synthetic construct
  source 1..172: mol_type = other RNA
gttcatcataggaaacaccaagtttaagagctagaaatagcaagtttaaataaggctagtccgttatcagcgtgaaaacgcggcaccgagtcggtgcattaaagagaatataatctttggtgtttcctatgtcctcgcggttctatctagttacgcgttaaaccaactagaa

SEQ ID NO: 1259 - RNA, 172 nt, synthetic construct
  source 1..172: mol_type = other RNA
gttcatcataggaaacaccaagtttaagagctagaaatagcaagtttaaataaggctagtccgttatcagcgtgaaaacgcggcaccgagtcggtgcattaaagagaatattatattcggtgtttcctatgtcctcgcggttctatctagttacgcgttaaaccaactagaa

SEQ ID NO: 1260 - RNA, 172 nt, synthetic construct
  source 1..172: mol_type = other RNA
gttcatcataggaaacaccaagtttaagagctagaaatagcaagtttaaataaggctagtccgttatcagcgtgaaaacgcggcaccgagtcggtgcattaaagaaaacataatctttggtgtttcctatgtcttcgcggttctatctagttacgcgttaaaccaactagaa

SEQ ID NO: 1261 - RNA, 172 nt, synthetic construct
  source 1..172: mol_type = other RNA
gttcatcataggaaacaccaagtttaagagctagaaatagcaagtttaaataaggctagtccgttatcagcgtgaaaacgcggcaccgagtcggtgcattaaagagaatattatcttcggtgtttcctatgtattcgcggttctatctagttacgcgttaaaccaactagaa

SEQ ID NO: 1262 - RNA, 172 nt, synthetic construct
  source 1..172: mol_type = other RNA
gttcatcataggaaacaccaagtttaagagctagaaatagcaagtttaaataaggctagtccgttatcagcgtgaaaacgcggcaccgagtcggtgcattaaagagaatataatattcggtgtttcctatgtcttcgcggttctatctagttacgcgttaaaccaactagaa

SEQ ID NO: 1263 - RNA, 172 nt, synthetic construct
  source 1..172: mol_type = other RNA
gttcatcataggaaacaccaagtttaagagctagaaatagcaagtttaaataaggctagtccgttatcagcgtgaaaacgcggcaccgagtcggtgcattaaggaaaatataatatttggtgtttcctatgtcatcgcggttctatctagttacgcgttaaaccaactagaa

SEQ ID NO: 1264 - RNA, 172 nt, synthetic construct
  source 1..172: mol_type = other RNA
gttcatcataggaaacaccaagtttaagagctagaaatagcaagtttaaataaggctagtccgttatcagcgtgaaaacgcggcaccgagtcggtgcattaaagagaacataatctttggtgtttcctatgtcatcgcggttctatctagttacgcgttaaaccaactagaa

SEQ ID NO: 1265 - RNA, 172 nt, synthetic construct
  source 1..172: mol_type = other RNA
gttcatcataggaaacaccaagttttagagctagaaatagcaagttaaaataaggctagtccgttatcgacttgaaaaagtcgcaccgagtcggtgcattaaagagaacataatctttggtgtttcctatgtattcgcggttctatctagttacgcgttaaaccaactagaa

SEQ ID NO: 1266 - RNA, 172 nt, synthetic construct
  source 1..172: mol_type = other RNA
gttcatcataggaaacaccaagtttaagagctagaaatagcaagtttaaataaggctagtccgttatcagcgtgaaaacgcggcaccgagtcggtgcattaaagagaacataatcttcggtgtttcctatgtcgtcgcggttctatctagttacgcgttaaaccaactagaa

SEQ ID NO: 1267 - RNA, 172 nt, synthetic construct
  source 1..172: mol_type = other RNA
gttcatcataggaaacaccaagtttaagagctagaaatagcaagtttaaataaggctagtccgttatcagcgtgaaaacgcggcaccgagtcggtgcattaaagaaaacattatcttcggtgtttcctatgtcgtcgcggttctatctagttacgcgttaaaccaactagaa

SEQ ID NO: 1268 - RNA, 172 nt, synthetic construct
  source 1..172: mol_type = other RNA
gttcatcataggaaacaccaagttttagagctagaaatagcaagttaaaataaggctagtccgttatcaacttgaaaaagtggcaccgagtcggtgcattaaagagaacataatctttggtgtttcctatgtattcgcggttctatctagttacgcgttaaaccaactagaa

SEQ ID NO: 1269 - RNA, 172 nt, synthetic construct
  source 1..172: mol_type = other RNA
gttcatcataggaaacaccaagtttaagagctagaaatagcaagtttaaataaggctagtccgttatcagcgtgaaaacgcggcaccgagtcggtgcattaaagagaacataatattcggtgtttcctatgtcttcgcggttctatctagttacgcgttaaaccaactagaa

SEQ ID NO: 1270 - RNA, 172 nt, synthetic construct
  source 1..172: mol_type = other RNA
gttcatcataggaaacaccaagtttaagagctagaaatagcaagtttaaataaggctagtccgttatcagcgtgaaaacgcggcaccgagtcggtgcattaaagagaatatcatcttcggtgtttcctatgtcctcgcggttctatctagttacgcgttaaaccaactagaa

SEQ ID NO: 1271 - RNA, 172 nt, synthetic construct
  source 1..172: mol_type = other RNA
gttcatcataggaaacaccaagtttaagagctagaaatagcaagtttaaataaggctagtccgttatcagcgtgaaaacgcggcaccgagtcggtgcattaaagaaaatattatattcggtgtttcctatgtcttcgcggttctatctagttacgcgttaaaccaactagaa

SEQ ID NO: 1272 - RNA, 172 nt, synthetic construct
  source 1..172: mol_type = other RNA
gttcatcataggaaacaccaagtttaagagctagaaatagcaagtttaaataaggctagtccgttatcagcgtgaaaacgcggcaccgagtcggtgcattaaagagaacataatatttggtgtttcctatgtcgtcgcggttctatctagttacgcgttaaaccaactagaa

SEQ ID NO: 1273 - RNA, 172 nt, synthetic construct
  source 1..172: mol_type = other RNA
gttcatcataggaaacaccaagttttagagctagaaatagcaagttaaaataaggctagtccgttatcgacttgaaaaagtcgcaccgagtcggtgcattaaagaaaatatcatcttcggtgtttcctatgtactcgcggttctatctagttacgcgttaaaccaactagaa

SEQ ID NO: 1274 - RNA, 172 nt, synthetic construct
  source 1..172: mol_type = other RNA
gttcatcataggaaacaccaagtttaagagctagaaatagcaagtttaaataaggctagtccgttatcagcgtgaaaacgcggcaccgagtcggtgcattaaagagaatatcatattcggtgtttcctatgtcttcgcggttctatctagttacgcgttaaaccaactagaa

SEQ ID NO: 1275 - RNA, 172 nt, synthetic construct
  source 1..172: mol_type = other RNA
gttcatcataggaaacaccaagtttaagagctagaaatagcaagtttaaataaggctagtccgttatcagcgtgaaaacgcggcaccgagtcggtgcattaaagaaaatatcatcttcggtgtttcctatgtattcgcggttctatctagttacgcgttaaaccaactagaa

SEQ ID NO: 1276 - RNA, 172 nt, synthetic construct
  source 1..172: mol_type = other RNA
gttcatcataggaaacaccaagtttaagagctagaaatagcaagtttaaataaggctagtccgttatcagcgtgaaaacgcggcaccgagtcggtgcattaaagaaaatatcatattcggtgtttcctatgtcttcgcggttctatctagttacgcgttaaaccaactagaa

SEQ ID NO: 1277 - RNA, 172 nt, synthetic construct
  source 1..172: mol_type = other RNA
gttcatcataggaaacaccaagtttaagagctagaaatagcaagtttaaataaggctagtccgttatcagcgtgaaaacgcggcaccgagtcggtgcattaaagaaaacattatatttggtgtttcctatgtactcgcggttctatctagttacgcgttaaaccaactagaa

SEQ ID NO: 1278 - RNA, 172 nt, synthetic construct
  source 1..172: mol_type = other RNA
gttcatcataggaaacaccaagtttaagagctagaaatagcaagtttaaataaggctagtccgttatcagcgtgaaaacgcggcaccgagtcggtgcattaaagagaacattatattcggtgtttcctatgtcttcgcggttctatctagttacgcgttaaaccaactagaa

SEQ ID NO: 1279 - RNA, 172 nt, synthetic construct
  source 1..172: mol_type = other RNA
gttcatcataggaaacaccaagtttaagagctagaaatagcaagtttaaataaggctagtccgttatcagcgtgaaaacgcggcaccgagtcggtgcattaaagagaatattatatttggtgtttcctatgtcatcgcggttctatctagttacgcgttaaaccaactagaa

SEQ ID NO: 1280 - RNA, 172 nt, synthetic construct
  source 1..172: mol_type = other RNA
gttcatcataggaaacaccaagtttaagagctagaaatagcaagtttaaataaggctagtccgttatcagcgtgaaaacgcggcaccgagtcggtgcattaaagaaaatattatctttggtgtttcctatgtcgtcgcggttctatctagttacgcgttaaaccaactagaa

SEQ ID NO: 1281 - RNA, 172 nt, synthetic construct
  source 1..172: mol_type = other RNA
gttcatcataggaaacaccaagtttaagagctagaaatagcaagtttaaataaggctagtccgttatcagcgtgaaaacgcggcaccgagtcggtgcattaaagagaatattatctttggtgtttcctatgtcgtcgcggttctatctagttacgcgttaaaccaactagaa

SEQ ID NO: 1282 - RNA, 172 nt, synthetic construct
  source 1..172: mol_type = other RNA
gttcatcataggaaacaccaagttttagagctagaaatagcaagttaaaataaggctagtccgttatcaacttgaaaaagtggcaccgagtcggtgcattaaagaaaatatcatcttcggtgtttcctatgtcctcgcggttctatctagttacgcgttaaaccaactagaa

SEQ ID NO: 1283 - RNA, 172 nt, synthetic construct
  source 1..172: mol_type = other RNA
gttcatcataggaaacaccaagtttaagagctagaaatagcaagtttaaataaggctagtccgttatcagcgtgaaaacgcggcaccgagtcggtgcattaaagaaaatattatatttggtgtttcctatgtcctcgcggttctatctagttacgcgttaaaccaactagaa

SEQ ID NO: 1284 - RNA, 172 nt, synthetic construct
  source 1..172: mol_type = other RNA
gttcatcataggaaacaccaagtttaagagctagaaatagcaagtttaaataaggctagtccgttatcagcgtgaaaacgcggcaccgagtcggtgcatcaaggaaaatatcatattcggtgtttcctatgtcctcgcggttctatctagttacgcgttaaaccaactagaa

SEQ ID NO: 1285 - RNA, 172 nt, synthetic construct
  source 1..172: mol_type = other RNA
gttcatcataggaaacaccaagtttaagagctagaaatagcaagtttaaataaggctagtccgttatcagcgtgaaaacgcggcaccgagtcggtgcattaaagaaaacattatctttggtgtttcctatgtcgtcgcggttctatctagttacgcgttaaaccaactagaa

SEQ ID NO: 1286 - RNA, 172 nt, synthetic construct
  source 1..172: mol_type = other RNA
gttcatcataggaaacaccaagtttaagagctagaaatagcaagtttaaataaggctagtccgttatcagcgtgaaaacgcggcaccgagtcggtgcattaaagagaacattatcttcggtgtttcctatgtcctcgcggttctatctagttacgcgttaaaccaactagaa

SEQ ID NO: 1287 - RNA, 172 nt, synthetic construct
  source 1..172: mol_type = other RNA
gttcatcataggaaacaccaagtttaagagctagaaatagcaagtttaaataaggctagtccgttatcagcgtgaaaacgcggcaccgagtcggtgcatcaaggaaaatatcatcttcggtgtttcctatgtcttcgcggttctatctagttacgcgttaaaccaactagaa

SEQ ID NO: 1288 - RNA, 172 nt, synthetic construct
  source 1..172: mol_type = other RNA
gttcatcataggaaacaccaagtttaagagctagaaatagcaagtttaaataaggctagtccgttatcagcgtgaaaacgcggcaccgagtcggtgcattaaagagaacattatctttggtgtttcctatgtcttcgcggttctatctagttacgcgttaaaccaactagaa

SEQ ID NO: 1289 - RNA, 172 nt, synthetic construct
  source 1..172: mol_type = other RNA
gttcatcataggaaacaccaagtttaagagctagaaatagcaagtttaaataaggctagtccgttatcagcgtgaaaacgcggcaccgagtcggtgcattaaagagaacatcatcttcggtgtttcctatgtcctcgcggttctatctagttacgcgttaaaccaactagaa

SEQ ID NO: 1290 - RNA, 172 nt, synthetic construct
  source 1..172: mol_type = other RNA
gttcatcataggaaacaccaagttttagagctagaaatagcaagttaaaataaggctagtccgttatcgacttgaaaaagtcgcaccgagtcggtgcattaaagaaaatatcatctttggtgtttcctatgtactcgcggttctatctagttacgcgttaaaccaactagaa

SEQ ID NO: 1291 - RNA, 172 nt, synthetic construct
  source 1..172: mol_type = other RNA
gttcatcataggaaacaccaagtttaagagctagaaatagcaagtttaaataaggctagtccgttatcagcgtgaaaacgcggcaccgagtcggtgcattaaagagaatatcatatttggtgtttcctatgtcatcgcggttctatctagttacgcgttaaaccaactagaa

SEQ ID NO: 1292 - RNA, 172 nt, synthetic construct
  source 1..172: mol_type = other RNA
gttcatcataggaaacaccaagtttaagagctagaaatagcaagtttaaataaggctagtccgttatcagcgtgaaaacgcggcaccgagtcggtgcattaaagagaatatcatctttggtgtttcctatgtcctcgcggttctatctagttacgcgttaaaccaactagaa

SEQ ID NO: 1293 - RNA, 172 nt, synthetic construct
  source 1..172: mol_type = other RNA
gttcatcataggaaacaccaagtttaagagctagaaatagcaagtttaaataaggctagtccgttatcagcgtgaaaacgcggcaccgagtcggtgcattaaagaaaacatcatattcggtgtttcctatgtattcgcggttctatctagttacgcgttaaaccaactagaa

SEQ ID NO: 1294 - RNA, 172 nt, synthetic construct
  source 1..172: mol_type = other RNA
gttcatcataggaaacaccaagtttaagagctagaaatagcaagtttaaataaggctagtccgttatcagcgtgaaaacgcggcaccgagtcggtgcattaaagagaacattatatttggtgtttcctatgtcgtcgcggttctatctagttacgcgttaaaccaactagaa

SEQ ID NO: 1295 - RNA, 172 nt, synthetic construct
  source 1..172: mol_type = other RNA
gttcatcataggaaacaccaagtttaagagctagaaatagcaagtttaaataaggctagtccgttatcagcgtgaaaacgcggcaccgagtcggtgcattaaagaaaatatcatctttggtgtttcctatgtattcgcggttctatctagttacgcgttaaaccaactagaa

SEQ ID NO: 1296 - RNA, 172 nt, synthetic construct
  source 1..172: mol_type = other RNA
gttcatcataggaaacaccaagttttagagctagaaatagcaagttaaaataaggctagtccgttatcaacttgaaaaagtggcaccgagtcggtgcattaaagaaaatatcatctttggtgtttcctatgtattcgcggttctatctagttacgcgttaaaccaactagaa

SEQ ID NO: 1297 - RNA, 172 nt, synthetic construct
  source 1..172: mol_type = other RNA
gttcatcataggaaacaccaagtttaagagctagaaatagcaagtttaaataaggctagtccgttatcagcgtgaaaacgcggcaccgagtcggtgcattaaagaaaacatcatcttcggtgtttcctatgtcgtcgcggttctatctagttacgcgttaaaccaactagaa

SEQ ID NO: 1298 - RNA, 172 nt, synthetic construct
  source 1..172: mol_type = other RNA
gttcatcataggaaacaccaagtttaagagctagaaatagcaagtttaaataaggctagtccgttatcagcgtgaaaacgcggcaccgagtcggtgcattaaagagaacatcatattcggtgtttcctatgtcatcgcggttctatctagttacgcgttaaaccaactagaa

SEQ ID NO: 1299 - RNA, 172 nt, synthetic construct
  source 1..172: mol_type = other RNA
gttcatcataggaaacaccaagtttaagagctagaaatagcaagtttaaataaggctagtccgttatcagcgtgaaaacgcggcaccgagtcggtgcattaaagaaaatatcatatttggtgtttcctatgtcttcgcggttctatctagttacgcgttaaaccaactagaa

SEQ ID NO: 1300 - RNA, 172 nt, synthetic construct
  source 1..172: mol_type = other RNA
gttcatcataggaaacaccaagttttagagctagaaatagcaagttaaaataaggctagtccgttatcgacttgaaaaagtcgcaccgagtcggtgcattaaagaaaacatcatatttggtgtttcctatgtcatcgcggttctatctagttacgcgttaaaccaactagaa

SEQ ID NO: 1301 - RNA, 172 nt, synthetic construct
  source 1..172: mol_type = other RNA
gttcatcataggaaacaccaagtttaagagctagaaatagcaagtttaaataaggctagtccgttatcagcgtgaaaacgcggcaccgagtcggtgcatcaaagagaacataatcttcggtgtttcctatgcagtcgcggttctatctagttacgcgttaaaccaactagaa

SEQ ID NO: 1302 - RNA, 172 nt, synthetic construct
  source 1..172: mol_type = other RNA
gttcatcataggaaacaccaagtttaagagctagaaatagcaagtttaaataaggctagtccgttatcagcgtgaaaacgcggcaccgagtcggtgcattaaggagaatatcatctttggtgtttcctatgtcttcgcggttctatctagttacgcgttaaaccaactagaa

SEQ ID NO: 1303 - RNA, 172 nt, synthetic construct
  source 1..172: mol_type = other RNA
gttcatcataggaaacaccaagtttaagagctagaaatagcaagtttaaataaggctagtccgttatcagcgtgaaaacgcggcaccgagtcggtgcatcaaagagaacataatctttggtgtttcctatgtcgtcgcggttctatctagttacgcgttaaaccaactagaa

SEQ ID NO: 1304 - RNA, 172 nt, synthetic construct
  source 1..172: mol_type = other RNA
gttcatcataggaaacaccaagttttagagctagaaatagcaagttaaaataaggctagtccgttatcgacttgaaaaagtcgcaccgagtcggtgcatcaaagagaacataatctttggtgtttcctatgtcctcgcggttctatctagttacgcgttaaaccaactagaa

SEQ ID NO: 1305 - RNA, 172 nt, synthetic construct
  source 1..172: mol_type = other RNA
gttcatcataggaaacaccaagttttagagctagaaatagcaagttaaaataaggctagtccgttatcaacttgaaaaagtggcaccgagtcggtgcattaaagaaaacatcatatttggtgtttcctatgtcgtcgcggttctatctagttacgcgttaaaccaactagaa

SEQ ID NO: 1306 - RNA, 172 nt, synthetic construct
  source 1..172: mol_type = other RNA
gttcatcataggaaacaccaagtttaagagctagaaatagcaagtttaaataaggctagtccgttatcagcgtgaaaacgcggcaccgagtcggtgcattaaagaaaacatcatatttggtgtttcctatgtcctcgcggttctatctagttacgcgttaaaccaactagaa

SEQ ID NO: 1307 - RNA, 172 nt, synthetic construct
  source 1..172: mol_type = other RNA
gttcatcataggaaacaccaagtttaagagctagaaatagcaagtttaaataaggctagtccgttatcagcgtgaaaacgcggcaccgagtcggtgcattaaagagaacatcatatttggtgtttcctatgtcttcgcggttctatctagttacgcgttaaaccaactagaa

SEQ ID NO: 1308 - RNA, 172 nt, synthetic construct
  source 1..172: mol_type = other RNA
gttcatcataggaaacaccaagtttaagagctagaaatagcaagtttaaataaggctagtccgttatcagcgtgaaaacgcggcaccgagtcggtgcattaaagagaacatcatctttggtgtttcctatgtcgtcgcggttctatctagttacgcgttaaaccaactagaa

SEQ ID NO: 1309 - RNA, 172 nt, synthetic construct
  source 1..172: mol_type = other RNA
gttcatcataggaaacaccaagttttagagctagaaatagcaagttaaaataaggctagtccgttatcaacttgaaaaagtggcaccgagtcggtgcatcaaagagaacataatctttggtgtttcctatgtcttcgcggttctatctagttacgcgttaaaccaactagaa

SEQ ID NO: 1310 - RNA, 172 nt, synthetic construct
  source 1..172: mol_type = other RNA
gttcatcataggaaacaccaagtttaagagctagaaatagcaagtttaaataaggctagtccgttatcagcgtgaaaacgcggcaccgagtcggtgcattaaagaaaacatcatctttggtgtttcctatgtcatcgcggttctatctagttacgcgttaaaccaactagaa

SEQ ID NO: 1311 - RNA, 172 nt, synthetic construct
  source 1..172: mol_type = other RNA
gttcatcataggaaacaccaagtttaagagctagaaatagcaagtttaaataaggctagtccgttatcagcgtgaaaacgcggcaccgagtcggtgcataaaagagaacattatatttggtgtttcctatgtactcgcggttctatctagttacgcgttaaaccaactagaa

SEQ ID NO: 1312 - RNA, 172 nt, synthetic construct
  source 1..172: mol_type = other RNA
gttcatcataggaaacaccaagtttaagagctagaaatagcaagtttaaataaggctagtccgttatcagcgtgaaaacgcggcaccgagtcggtgcatcaaggagaacattatattcggtgtttcctatgtactcgcggttctatctagttacgcgttaaaccaactagaa

SEQ ID NO: 1313 - RNA, 172 nt, synthetic construct
  source 1..172: mol_type = other RNA
gttcatcataggaaacaccaagtttaagagctagaaatagcaagtttaaataaggctagtccgttatcagcgtgaaaacgcggcaccgagtcggtgcatcaaggagaatataatctttggtgtttcctatgtcttcgcggttctatctagttacgcgttaaaccaactagaa

SEQ ID NO: 1314 - RNA, 172 nt, synthetic construct
  source 1..172: mol_type = other RNA
gttcatcataggaaacaccaagtttaagagctagaaatagcaagtttaaataaggctagtccgttatcagcgtgaaaacgcggcaccgagtcggtgcatcaaggagaatataatcttcggtgtttcctatgtattcgcggttctatctagttacgcgttaaaccaactagaa

SEQ ID NO: 1315 - RNA, 172 nt, synthetic construct
  source 1..172: mol_type = other RNA
gttcatcataggaaacaccaagtttaagagctagaaatagcaagtttaaataaggctagtccgttatcagcgtgaaaacgcggcaccgagtcggtgcatcaaggagaacatcatcttcggtgtttcctatgtcatcgcggttctatctagttacgcgttaaaccaactagaa

SEQ ID NO: 1316 - RNA, 172 nt, synthetic construct
  source 1..172: mol_type = other RNA
gttcatcataggaaacaccaagtttaagagctagaaatagcaagtttaaataaggctagtccgttatcagcgtgaaaacgcggcaccgagtcggtgcataaaggagaacataatattcggtgtttcctatgtcctcgcggttctatctagttacgcgttaaaccaactagaa

SEQ ID NO: 1317 - RNA, 172 nt, synthetic construct
  source 1..172: mol_type = other RNA
gtctgtatctatattcatcatgtttaagagcggggaaatccgcaagtttaaataaggctagtccgttatcagcgtgaaaacgcggcaccgagtcggtgctcatctttggtgtttcctatgatgaatatagatacacgcggttctatctagttacgcgttaaaccaactagaa

SEQ ID NO: 1318 - RNA, 172 nt, synthetic construct
  source 1..172: mol_type = other RNA
gtctgtatctatattcatcatgtttaagagcggggaaatccgcaagtttaaataaggctagtccgttatcagcgtgaaaacgcggcaccgagtcggtgcatcatctttggtgtttcctatgatgaatatagataccgcggttctatctagttacgcgttaaaccaactagaa

SEQ ID NO: 1319 - RNA, 172 nt, synthetic construct
  source 1..172: mol_type = other RNA
gtctgtatctatattcatcatgtttaagagcggggaaatccgcaagtttaaataaggctagtccgttatcagcgtgaaaacgcggcaccgagtcggtgctatcatctttggtgtttcctatgatgaatatagatacgcggttctatctagttacgcgttaaaccaactagaa

SEQ ID NO: 1320 - RNA, 172 nt, synthetic construct
  source 1..172: mol_type = other RNA
gtctgtatctatattcatcatgtttaagagcggggaaatccgcaagtttaaataaggctagtccgttatcagcgtgaaaacgcggcaccgagtcggtgcatatcatctttggtgtttcctatgatgaatatagatcgcggttctatctagttacgcgttaaaccaactagaa

SEQ ID NO: 1321 - RNA, 172 nt, synthetic construct
  source 1..172: mol_type = other RNA
gtctgtatctatattcatcatgtttaagagcggggaaatccgcaagtttaaataaggctagtccgttatcagcgtgaaaacgcggcaccgagtcggtgcaatatcatctttggtgtttcctatgatgaatatagacgcggttctatctagttacgcgttaaaccaactagaa

SEQ ID NO: 1322 - RNA, 172 nt, synthetic construct
  source 1..172: mol_type = other RNA
gtctgtatctatattcatcatgtttaagagcggggaaatccgcaagtttaaataaggctagtccgttatcagcgtgaaaacgcggcaccgagtcggtgcaaatatcatctttggtgtttcctatgatgaatatagcgcggttctatctagttacgcgttaaaccaactagaa

SEQ ID NO: 1323 - RNA, 172 nt, synthetic construct
  source 1..172: mol_type = other RNA
gtctgtatctatattcatcatgtttaagagcggggaaatccgcaagtttaaataaggctagtccgttatcagcgtgaaaacgcggcaccgagtcggtgcaaaatatcatctttggtgtttcctatgatgaatatacgcggttctatctagttacgcgttaaaccaactagaa

SEQ ID NO: 1324 - RNA, 172 nt, synthetic construct
  source 1..172: mol_type = other RNA
gtctgtatctatattcatcatgtttaagagcggggaaatccgcaagtttaaataaggctagtccgttatcagcgtgaaaacgcggcaccgagtcggtgcgaaaatatcatctttggtgtttcctatgatgaatatcgcggttctatctagttacgcgttaaaccaactagaa

SEQ ID NO: 1325 - RNA, 172 nt, synthetic construct
  source 1..172: mol_type = other RNA
gttcatcataggaaacaccaagtttaagagcggggaaatccgcaagtttaaataaggctagtccgttatcagcgtgaaaacgcggcaccgagtcggtgcttaaagaaaatatcatctttggtgtttcctatgatgcgcggttctatctagttacgcgttaaaccaactagaa

SEQ ID NO: 1326 - RNA, 172 nt, synthetic construct
  source 1..172: mol_type = other RNA
gttcatcataggaaacaccaagtttaagagcggggaaatccgcaagtttaaataaggctagtccgttatcagcgtgaaaacgcggcaccgagtcggtgcattaaagaaaatatcatctttggtgtttcctatgatcgcggttctatctagttacgcgttaaaccaactagaa

SEQ ID NO: 1327 - RNA, 172 nt, synthetic construct
  source 1..172: mol_type = other RNA
gttcatcataggaaacaccaagtttaagagcggggaaatccgcaagtttaaataaggctagtccgttatcagcgtgaaaacgcggcaccgagtcggtgccattaaagaaaatatcatctttggtgtttcctatgacgcggttctatctagttacgcgttaaaccaactagaa

SEQ ID NO: 1328 - RNA, 172 nt, synthetic construct
  source 1..172: mol_type = other RNA
gttcatcataggaaacaccaagtttaagagcggggaaatccgcaagtttaaataaggctagtccgttatcagcgtgaaaacgcggcaccgagtcggtgcccattaaagaaaatatcatctttggtgtttcctatgcgcggttctatctagttacgcgttaaaccaactagaa

SEQ ID NO: 1329 - RNA, 172 nt, synthetic construct
  source 1..172: mol_type = other RNA
gttcatcataggaaacaccaagtttaagagcggggaaatccgcaagtttaaataaggctagtccgttatcagcgtgaaaacgcggcaccgagtcggtgcaccattaaagaaaatatcatctttggtgtttcctatcgcggttctatctagttacgcgttaaaccaactagaa

SEQ ID NO: 1330 - RNA, 172 nt, synthetic construct
  source 1..172: mol_type = other RNA
gttcatcataggaaacaccaagtttaagagcggggaaatccgcaagtttaaataaggctagtccgttatcagcgtgaaaacgcggcaccgagtcggtgccaccattaaagaaaatatcatctttggtgtttcctacgcggttctatctagttacgcgttaaaccaactagaa

SEQ ID NO: 1331 - RNA, 172 nt, synthetic construct
  source 1..172: mol_type = other RNA
gttcatcataggaaacaccaagtttaagagcggggaaatccgcaagtttaaataaggctagtccgttatcagcgtgaaaacgcggcaccgagtcggtgcgcaccattaaagaaaatatcatctttggtgtttcctcgcggttctatctagttacgcgttaaaccaactagaa

SEQ ID NO: 1332 - RNA, 172 nt, synthetic construct
  source 1..172: mol_type = other RNA
gttcatcataggaaacaccaagtttaagagcggggaaatccgcaagtttaaataaggctagtccgttatcagcgtgaaaacgcggcaccgagtcggtgcggcaccattaaagaaaatatcatctttggtgtttcccgcggttctatctagttacgcgttaaaccaactagaa

SEQ ID NO: 1333 - RNA, 173 nt, synthetic construct
  source 1..173: mol_type = other RNA
gttcatcataggaaacaccaagttttagagctagaaatagcaagttaaaataaggctagtccgttatcaacttgaaaaagtggcaccgagtcggtgcattaaagaaaatatcatctttggtgtttcctatttcaatcgcggttctatctagttacgcgttaaaccaactagaa

SEQ ID NO: 1334 - RNA, 173 nt, synthetic construct
  source 1..173: mol_type = other RNA
gttcatcataggaaacaccaagttttagagctagaaatagcaagttaaaataaggctagtccgttatcaacttgaaaaagtggcaccgagtcggtgcattaaagaaaatatcatctttggtgtttcctatttcattcgcggttctatctagttacgcgttaaaccaactagaa

SEQ ID NO: 1335 - RNA, 173 nt, synthetic construct
  source 1..173: mol_type = other RNA
gtctgtatctatattcatcatgtttaagagctagaaatagcaagtttaaataaggctagtccgttatcagcgtgaaaacgcggcaccgagtcggtgcaatatcatctttggtgtttcctatgatgaatatagtcttcgcggttctatctagttacgcgttaaaccaactagaa

SEQ ID NO: 1336 - RNA, 173 nt, synthetic construct
  source 1..173: mol_type = other RNA
gtctgtatctatattcatcatgtttaagagcggggaaatccgcaagtttaaataaggctagtccgttatcagcgtgaaaacgcggcaccgagtcggtgcatcatctttggtgtttcctatgatgaatatagatacacgcggttctatctagttacgcgttaaaccaactagaa

SEQ ID NO: 1337 - RNA, 173 nt, synthetic construct
  source 1..173: mol_type = other RNA
gtctgtatctatattcatcatgtttaagagcggggaaatccgcaagtttaaataaggctagtccgttatcagcgtgaaaacgcggcaccgagtcggtgctatcatctttggtgtttcctatgatgaatatagataccgcggttctatctagttacgcgttaaaccaactagaa

SEQ ID NO: 1338 - RNA, 173 nt, synthetic construct
  source 1..173: mol_type = other RNA
gtctgtatctatattcatcatgtttaagagcggggaaatccgcaagtttaaataaggctagtccgttatcagcgtgaaaacgcggcaccgagtcggtgcatatcatctttggtgtttcctatgatgaatatagatacgcggttctatctagttacgcgttaaaccaactagaa

SEQ ID NO: 1339 - RNA, 173 nt, synthetic construct
  source 1..173: mol_type = other RNA
gtctgtatctatattcatcatgtttaagagcggggaaatccgcaagtttaaataaggctagtccgttatcagcgtgaaaacgcggcaccgagtcggtgcaatatcatctttggtgtttcctatgatgaatatagatcgcggttctatctagttacgcgttaaaccaactagaa

SEQ ID NO: 1340 - RNA, 173 nt, synthetic construct
  source 1..173: mol_type = other RNA
gtctgtatctatattcatcatgtttaagagcggggaaatccgcaagtttaaataaggctagtccgttatcagcgtgaaaacgcggcaccgagtcggtgcaaatatcatctttggtgtttcctatgatgaatatagacgcggttctatctagttacgcgttaaaccaactagaa

SEQ ID NO: 1341 - RNA, 173 nt, synthetic construct
  source 1..173: mol_type = other RNA
gtctgtatctatattcatcatgtttaagagcggggaaatccgcaagtttaaataaggctagtccgttatcagcgtgaaaacgcggcaccgagtcggtgcaaaatatcatctttggtgtttcctatgatgaatatagcgcggttctatctagttacgcgttaaaccaactagaa

SEQ ID NO: 1342 - RNA, 173 nt, synthetic construct
  source 1..173: mol_type = other RNA
gtctgtatctatattcatcatgtttaagagcggggaaatccgcaagtttaaataaggctagtccgttatcagcgtgaaaacgcggcaccgagtcggtgcgaaaatatcatctttggtgtttcctatgatgaatatacgcggttctatctagttacgcgttaaaccaactagaa

SEQ ID NO: 1343 - RNA, 173 nt, synthetic construct
  source 1..173: mol_type = other RNA
gtctgtatctatattcatcatgtttaagagcggggaaatccgcaagtttaaataaggctagtccgttatcagcgtgaaaacgcggcaccgagtcggtgcagaaaatatcatctttggtgtttcctatgatgaatatcgcggttctatctagttacgcgttaaaccaactagaa

SEQ ID NO: 1344 - RNA, 173 nt, synthetic construct
  source 1..173: mol_type = other RNA
gttcatcataggaaacaccaagtttaagagcggggaaatccgcaagtttaaataaggctagtccgttatcagcgtgaaaacgcggcaccgagtcggtgcattaaagaaaatatcatctttggtgtttcctatgatgcgcggttctatctagttacgcgttaaaccaactagaa

SEQ ID NO: 1345 - RNA, 173 nt, synthetic construct
  source 1..173: mol_type = other RNA
gttcatcataggaaacaccaagtttaagagcggggaaatccgcaagtttaaataaggctagtccgttatcagcgtgaaaacgcggcaccgagtcggtgccattaaagaaaatatcatctttggtgtttcctatgatcgcggttctatctagttacgcgttaaaccaactagaa

SEQ ID NO: 1346 - RNA, 173 nt, synthetic construct
  source 1..173: mol_type = other RNA
gttcatcataggaaacaccaagtttaagagcggggaaatccgcaagtttaaataaggctagtccgttatcagcgtgaaaacgcggcaccgagtcggtgcccattaaagaaaatatcatctttggtgtttcctatgacgcggttctatctagttacgcgttaaaccaactagaa

SEQ ID NO: 1347 - RNA, 173 nt, synthetic construct
  source 1..173: mol_type = other RNA
gttcatcataggaaacaccaagtttaagagcggggaaatccgcaagtttaaataaggctagtccgttatcagcgtgaaaacgcggcaccgagtcggtgcaccattaaagaaaatatcatctttggtgtttcctatgcgcggttctatctagttacgcgttaaaccaactagaa

SEQ ID NO: 1348 - RNA, 173 nt, synthetic construct
  source 1..173: mol_type = other RNA
gttcatcataggaaacaccaagtttaagagcggggaaatccgcaagtttaaataaggctagtccgttatcagcgtgaaaacgcggcaccgagtcggtgccaccattaaagaaaatatcatctttggtgtttcctatcgcggttctatctagttacgcgttaaaccaactagaa

SEQ ID NO: 1349 - RNA, 173 nt, synthetic construct
  source 1..173: mol_type = other RNA
gttcatcataggaaacaccaagtttaagagcggggaaatccgcaagtttaaataaggctagtccgttatcagcgtgaaaacgcggcaccgagtcggtgcgcaccattaaagaaaatatcatctttggtgtttcctacgcggttctatctagttacgcgttaaaccaactagaa

SEQ ID NO: 1350 - RNA, 173 nt, synthetic construct
  source 1..173: mol_type = other RNA
gttcatcataggaaacaccaagtttaagagcggggaaatccgcaagtttaaataaggctagtccgttatcagcgtgaaaacgcggcaccgagtcggtgcggcaccattaaagaaaatatcatctttggtgtttcctcgcggttctatctagttacgcgttaaaccaactagaa

SEQ ID NO: 1351 - RNA, 173 nt, synthetic construct
  source 1..173: mol_type = other RNA
gttcatcataggaaacaccaagtttaagagcggggaaatccgcaagtttaaataaggctagtccgttatcagcgtgaaaacgcggcaccgagtcggtgctggcaccattaaagaaaatatcatctttggtgtttcccgcggttctatctagttacgcgttaaaccaactagaa

SEQ ID NO: 1352 - RNA, 174 nt, synthetic construct
  source 1..174: mol_type = other RNA
gtctgtatctatattcatcatgtttaagagctagaaatagcaagtttaaataaggctagtccgttatcagcgtgaaaacgcggcaccgagtcggtgctcatctttggtgtttcctatgatgaatatagatacatgaccgcggttctatctagttacgcgttaaaccaactagaa

SEQ ID NO: 1353 - RNA, 174 nt, synthetic construct
  source 1..174: mol_type = other RNA
gtctgtatctatattcatcatgtttaagagctagaaatagcaagtttaaataaggctagtccgttatcagcgtgaaaacgcggcaccgagtcggtgcgaaaatatcatctttggtgtttcctatgatgaatatccctcgcggttctatctagttacgcgttaaaccaactagaa

SEQ ID NO: 1354 - RNA, 174 nt, synthetic construct
  source 1..174: mol_type = other RNA
gaccattaaagaaaatatcatgtttaagagctagaaatagcaagtttaaataaggctagtccgttatcagcgtgaaaacgcggcaccgagtcggtgcttcatcataggaaacaccaaagatgatattttcttactgtcgcggttctatctagttacgcgttaaaccaactagaa

SEQ ID NO: 1355 - RNA, 174 nt, synthetic construct
  source 1..174: mol_type = other RNA
gttcatcataggaaacaccaagtttaagagcggggaaatccgcaagtttaaataaggctagtccgttatcagcgtgaaaacgcggcaccgagtcggtgcataaaagaaaacatcatctttggtgtttcctatgtactcgcggttctatctagttacgcgttaaaccaactagaa

SEQ ID NO: 1356 - RNA, 174 nt, synthetic construct
  source 1..174: mol_type = other RNA
gttcatcataggaaacaccaagtttaagagcggggaaatccgcaagtttaaataaggctagtccgttatcagcgtgaaaacgcggcaccgagtcggtgcataaaagaaaatatcatcttcggtgtttcctatgtcatcgcggttctatctagttacgcgttaaaccaactagaa

SEQ ID NO: 1357 - RNA, 174 nt, synthetic construct
  source 1..174: mol_type = other RNA
gttcatcataggaaacaccaagtttaagagcggggaaatccgcaagtttaaataaggctagtccgttatcagcgtgaaaacgcggcaccgagtcggtgcataaaagaaaatatcatctttggtgtttcctatgtactcgcggttctatctagttacgcgttaaaccaactagaa

SEQ ID NO: 1358 - RNA, 174 nt, synthetic construct
  source 1..174: mol_type = other RNA
gttcatcataggaaacaccaagtttaagagcggggaaatccgcaagtttaaataaggctagtccgttatcagcgtgaaaacgcggcaccgagtcggtgcataaaagaaaatattatctttggtgtttcctatgtcctcgcggttctatctagttacgcgttaaaccaactagaa

SEQ ID NO: 1359 - RNA, 174 nt, synthetic construct
  source 1..174: mol_type = other RNA
gttcatcataggaaacaccaagtttaagagcggggaaatccgcaagtttaaataaggctagtccgttatcagcgtgaaaacgcggcaccgagtcggtgcataaaagagaatatcatctttggtgtttcctatgtcatcgcggttctatctagttacgcgttaaaccaactagaa

SEQ ID NO: 1360 - RNA, 174 nt, synthetic construct
  source 1..174: mol_type = other RNA
gttcatcataggaaacaccaagtttaagagcggggaaatccgcaagtttaaataaggctagtccgttatcagcgtgaaaacgcggcaccgagtcggtgcataaaggaaaatatcatctttggtgtttcctatgtcctcgcggttctatctagttacgcgttaaaccaactagaa

SEQ ID NO: 1361 - RNA, 174 nt, synthetic construct
  source 1..174: mol_type = other RNA
gttcatcataggaaacaccaagtttaagagcggggaaatccgcaagtttaaataaggctagtccgttatcagcgtgaaaacgcggcaccgagtcggtgcatcaaagaaaacatcatctttggtgtttcctatgcgctcgcggttctatctagttacgcgttaaaccaactagaa

SEQ ID NO: 1362 - RNA, 174 nt, synthetic construct
  source 1..174: mol_type = other RNA
gttcatcataggaaacaccaagtttaagagcggggaaatccgcaagtttaaataaggctagtccgttatcagcgtgaaaacgcggcaccgagtcggtgcatcaaagaaaatataatctttggtgtttcctatgtattcgcggttctatctagttacgcgttaaaccaactagaa

SEQ ID NO: 1363 - RNA, 174 nt, synthetic construct
  source 1..174: mol_type = other RNA
gttcatcataggaaacaccaagtttaagagcggggaaatccgcaagtttaaataaggctagtccgttatcagcgtgaaaacgcggcaccgagtcggtgcatcaaagaaaatatcatcttcggtgtttcctatgtcatcgcggttctatctagttacgcgttaaaccaactagaa

SEQ ID NO: 1364 - RNA, 174 nt, synthetic construct
  source 1..174: mol_type = other RNA
gttcatcataggaaacaccaagtttaagagcggggaaatccgcaagtttaaataaggctagtccgttatcagcgtgaaaacgcggcaccgagtcggtgcatcaaagaaaatatcatctttggtgtttcctatgtattcgcggttctatctagttacgcgttaaaccaactagaa

SEQ ID NO: 1365 - RNA, 174 nt, synthetic construct
  source 1..174: mol_type = other RNA
gttcatcataggaaacaccaagtttaagagcggggaaatccgcaagtttaaataaggctagtccgttatcagcgtgaaaacgcggcaccgagtcggtgcatcaaagaaaatattatctttggtgtttcctatgtattcgcggttctatctagttacgcgttaaaccaactagaa

SEQ ID NO: 1366 - RNA, 174 nt, synthetic construct
  source 1..174: mol_type = other RNA
gttcatcataggaaacaccaagtttaagagcggggaaatccgcaagtttaaataaggctagtccgttatcagcgtgaaaacgcggcaccgagtcggtgcatcaaagagaatatcatctttggtgtttcctatgtactcgcggttctatctagttacgcgttaaaccaactagaa

SEQ ID NO: 1367 - RNA, 174 nt, synthetic construct
  source 1..174: mol_type = other RNA
gttcatcataggaaacaccaagtttaagagcggggaaatccgcaagtttaaataaggctagtccgttatcagcgtgaaaacgcggcaccgagtcggtgcatcaaggaaaatatcatctttggtgtttcctatgtcctcgcggttctatctagttacgcgttaaaccaactagaa

SEQ ID NO: 1368 - RNA, 174 nt, synthetic construct
  source 1..174: mol_type = other RNA
gttcatcataggaaacaccaagtttaagagcggggaaatccgcaagtttaaataaggctagtccgttatcagcgtgaaaacgcggcaccgagtcggtgcattaaggaaaacatcatctttggtgtttcctatgtattcgcggttctatctagttacgcgttaaaccaactagaa

SEQ ID NO: 1369 - RNA, 174 nt, synthetic construct
  source 1..174: mol_type = other RNA
gttcatcataggaaacaccaagtttaagagcggggaaatccgcaagtttaaataaggctagtccgttatcagcgtgaaaacgcggcaccgagtcggtgcattaaggaaaatataatctttggtgtttcctatgtactcgcggttctatctagttacgcgttaaaccaactagaa

SEQ ID NO: 1370 - RNA, 174 nt, synthetic construct
  source 1..174: mol_type = other RNA
gttcatcataggaaacaccaagtttaagagcggggaaatccgcaagtttaaataaggctagtccgttatcagcgtgaaaacgcggcaccgagtcggtgcattaaggaaaatatcatcttcggtgtttcctatgtcgtcgcggttctatctagttacgcgttaaaccaactagaa

SEQ ID NO: 1371 - RNA, 174 nt, synthetic construct
  source 1..174: mol_type = other RNA
gttcatcataggaaacaccaagtttaagagcggggaaatccgcaagtttaaataaggctagtccgttatcagcgtgaaaacgcggcaccgagtcggtgcattaaggaaaatatcatctttggtgtttcctatgtattcgcggttctatctagttacgcgttaaaccaactagaa

SEQ ID NO: 1372 - RNA, 174 nt, synthetic construct
  source 1..174: mol_type = other RNA
gttcatcataggaaacaccaagtttaagagcggggaaatccgcaagtttaaataaggctagtccgttatcagcgtgaaaacgcggcaccgagtcggtgcattaaggaaaatattatctttggtgtttcctatgtcctcgcggttctatctagttacgcgttaaaccaactagaa

SEQ ID NO: 1373 - RNA, 174 nt, synthetic construct
  source 1..174: mol_type = other RNA
gttcatcataggaaacaccaagtttaagagcggggaaatccgcaagtttaaataaggctagtccgttatcagcgtgaaaacgcggcaccgagtcggtgcattaaagaaaacataatattcggtgtttcctatgtcttcgcggttctatctagttacgcgttaaaccaactagaa

SEQ ID NO: 1374 - RNA, 174 nt, synthetic construct
  source 1..174: mol_type = other RNA
gttcatcataggaaacaccaagtttaagagcggggaaatccgcaagtttaaataaggctagtccgttatcagcgtgaaaacgcggcaccgagtcggtgcattaaagaaaatataatcttcggtgtttcctatgtattcgcggttctatctagttacgcgttaaaccaactagaa

SEQ ID NO: 1375 - RNA, 174 nt, synthetic construct
  source 1..174: mol_type = other RNA
gttcatcataggaaacaccaagtttaagagcggggaaatccgcaagtttaaataaggctagtccgttatcagcgtgaaaacgcggcaccgagtcggtgcattaaagagaatataatcttcggtgtttcctatgtcgtcgcggttctatctagttacgcgttaaaccaactagaa

SEQ ID NO: 1376 - RNA, 174 nt, synthetic construct
  source 1..174: mol_type = other RNA
gttcatcataggaaacaccaagtttaagagcggggaaatccgcaagtttaaataaggctagtccgttatcagcgtgaaaacgcggcaccgagtcggtgcataaaagaaaatataatctttggtgtttcctatgtatccgcggttctatctagttacgcgttaaaccaactagaa

SEQ ID NO: 1377 - RNA, 174 nt, synthetic construct
  source 1..174: mol_type = other RNA
gttcatcataggaaacaccaagtttaagagcggggaaatccgcaagtttaaataaggctagtccgttatcagcgtgaaaacgcggcaccgagtcggtgcattaaagaaaacataatcttcggtgtttcctatgtcatcgcggttctatctagttacgcgttaaaccaactagaa

SEQ ID NO: 1378 - RNA, 174 nt, synthetic construct
  source 1..174: mol_type = other RNA
gttcatcataggaaacaccaagtttaagagcggggaaatccgcaagtttaaataaggctagtccgttatcagcgtgaaaacgcggcaccgagtcggtgcattaaagaaaatattatcttcggtgtttcctatgtcctcgcggttctatctagttacgcgttaaaccaactagaa

SEQ ID NO: 1379 - RNA, 174 nt, synthetic construct
  source 1..174: mol_type = other RNA
gttcatcataggaaacaccaagtttaagagcggggaaatccgcaagtttaaataaggctagtccgttatcagcgtgaaaacgcggcaccgagtcggtgcattaaagaaaatataatctttggtgtttcctatgtattcgcggttctatctagttacgcgttaaaccaactagaa

SEQ ID NO: 1380 - RNA, 174 nt, synthetic construct
  source 1..174: mol_type = other RNA
gttcatcataggaaacaccaagtttaagagcggggaaatccgcaagtttaaataaggctagtccgttatcagcgtgaaaacgcggcaccgagtcggtgcattaaagagaatataatctttggtgtttcctatgtcgtcgcggttctatctagttacgcgttaaaccaactagaa

SEQ ID NO: 1381 - RNA, 174 nt, synthetic construct
  source 1..174: mol_type = other RNA
gttcatcataggaaacaccaagtttaagagcggggaaatccgcaagtttaaataaggctagtccgttatcagcgtgaaaacgcggcaccgagtcggtgcattaaagaaaacataatctttggtgtttcctatgtcgtcgcggttctatctagttacgcgttaaaccaactagaa

SEQ ID NO: 1382 - RNA, 174 nt, synthetic construct
  source 1..174: mol_type = other RNA
gttcatcataggaaacaccaagtttaagagcggggaaatccgcaagtttaaataaggctagtccgttatcagcgtgaaaacgcggcaccgagtcggtgcattaaagagaatattatcttcggtgtttcctatgtcgtcgcggttctatctagttacgcgttaaaccaactagaa

SEQ ID NO: 1383 - RNA, 174 nt, synthetic construct
  source 1..174: mol_type = other RNA
gttcatcataggaaacaccaagtttaagagcggggaaatccgcaagtttaaataaggctagtccgttatcagcgtgaaaacgcggcaccgagtcggtgcatcaaagagaacataatctttggtgtttcctatgtattcgcggttctatctagttacgcgttaaaccaactagaa

SEQ ID NO: 1384 - RNA, 174 nt, synthetic construct
  source 1..174: mol_type = other RNA
gttcatcataggaaacaccaagtttaagagcggggaaatccgcaagtttaaataaggctagtccgttatcagcgtgaaaacgcggcaccgagtcggtgcattaaagaaaatatcatctttggtgtttcctatgtcatcgcggttctatctagttacgcgttaaaccaactagaa

SEQ ID NO: 1385 - RNA, 174 nt, synthetic construct
  source 1..174: mol_type = other RNA
gttcatcataggaaacaccaagtttaagagcggggaaatccgcaagtttaaataaggctagtccgttatcagcgtgaaaacgcggcaccgagtcggtgcattaaagaaaacatcatatttggtgtttcctatgtattcgcggttctatctagttacgcgttaaaccaactagaa

SEQ ID NO: 1386 - RNA, 174 nt, synthetic construct
  source 1..174: mol_type = other RNA
gttcatcataggaaacaccaagtttaagagcggggaaatccgcaagtttaaataaggctagtccgttatcagcgtgaaaacgcggcaccgagtcggtgcattaaagaaaatatcatcttcggtgtttcctatgtcctcgcggttctatctagttacgcgttaaaccaactagaa

SEQ ID NO: 1387 - RNA, 174 nt, synthetic construct
  source 1..174: mol_type = other RNA
gttcatcataggaaacaccaagtttaagagcggggaaatccgcaagtttaaataaggctagtccgttatcagcgtgaaaacgcggcaccgagtcggtgcattaaagagaacataatctttggtgtttcctatgtcttcgcggttctatctagttacgcgttaaaccaactagaa

SEQ ID NO: 1388 - RNA, 174 nt, synthetic construct
  source 1..174: mol_type = other RNA
gtctgtatctatattcatcatgtttaagagcggggaaatccgcaagtttaaataaggctagtccgttatcagcgtgaaaacgcggcaccgagtcggtgctatcatctttggtgtttcctatgatgaatatagatacacgcggttctatctagttacgcgttaaaccaactagaa

SEQ ID NO: 1389 - RNA, 174 nt, synthetic construct
  source 1..174: mol_type = other RNA
gtctgtatctatattcatcatgtttaagagcggggaaatccgcaagtttaaataaggctagtccgttatcagcgtgaaaacgcggcaccgagtcggtgcatatcatctttggtgtttcctatgatgaatatagataccgcggttctatctagttacgcgttaaaccaactagaa

SEQ ID NO: 1390 - RNA, 174 nt, synthetic construct
  source 1..174: mol_type = other RNA
gtctgtatctatattcatcatgtttaagagcggggaaatccgcaagtttaaataaggctagtccgttatcagcgtgaaaacgcggcaccgagtcggtgcaatatcatctttggtgtttcctatgatgaatatagatacgcggttctatctagttacgcgttaaaccaactagaa

SEQ ID NO: 1391 - RNA, 174 nt, synthetic construct
  source 1..174: mol_type = other RNA
gtctgtatctatattcatcatgtttaagagcggggaaatccgcaagtttaaataaggctagtccgttatcagcgtgaaaacgcggcaccgagtcggtgcaaatatcatctttggtgtttcctatgatgaatatagatcgcggttctatctagttacgcgttaaaccaactagaa

SEQ ID NO: 1392 - RNA, 174 nt, synthetic construct
  source 1..174: mol_type = other RNA
gtctgtatctatattcatcatgtttaagagcggggaaatccgcaagtttaaataaggctagtccgttatcagcgtgaaaacgcggcaccgagtcggtgcaaaatatcatctttggtgtttcctatgatgaatatagacgcggttctatctagttacgcgttaaaccaactagaa

SEQ ID NO: 1393 - RNA, 174 nt, synthetic construct
  source 1..174: mol_type = other RNA
gtctgtatctatattcatcatgtttaagagcggggaaatccgcaagtttaaataaggctagtccgttatcagcgtgaaaacgcggcaccgagtcggtgcgaaaatatcatctttggtgtttcctatgatgaatatagcgcggttctatctagttacgcgttaaaccaactagaa

SEQ ID NO: 1394 - RNA, 174 nt, synthetic construct
  source 1..174: mol_type = other RNA
gtctgtatctatattcatcatgtttaagagcggggaaatccgcaagtttaaataaggctagtccgttatcagcgtgaaaacgcggcaccgagtcggtgcagaaaatatcatctttggtgtttcctatgatgaatatacgcggttctatctagttacgcgttaaaccaactagaa

SEQ ID NO: 1395 - RNA, 174 nt, synthetic construct
  source 1..174: mol_type = other RNA
gtctgtatctatattcatcatgtttaagagcggggaaatccgcaagtttaaataaggctagtccgttatcagcgtgaaaacgcggcaccgagtcggtgcaagaaaatatcatctttggtgtttcctatgatgaatatcgcggttctatctagttacgcgttaaaccaactagaa

SEQ ID NO: 1396 - RNA, 174 nt, synthetic construct
  source 1..174: mol_type = other RNA
gttcatcataggaaacaccaagtttaagagcggggaaatccgcaagtttaaataaggctagtccgttatcagcgtgaaaacgcggcaccgagtcggtgccattaaagaaaatatcatctttggtgtttcctatgatgcgcggttctatctagttacgcgttaaaccaactagaa

SEQ ID NO: 1397 - RNA, 174 nt, synthetic construct
  source 1..174: mol_type = other RNA
gttcatcataggaaacaccaagtttaagagcggggaaatccgcaagtttaaataaggctagtccgttatcagcgtgaaaacgcggcaccgagtcggtgcccattaaagaaaatatcatctttggtgtttcctatgatcgcggttctatctagttacgcgttaaaccaactagaa

SEQ ID NO: 1398 - RNA, 174 nt, synthetic construct
  source 1..174: mol_type = other RNA
gttcatcataggaaacaccaagtttaagagcggggaaatccgcaagtttaaataaggctagtccgttatcagcgtgaaaacgcggcaccgagtcggtgcaccattaaagaaaatatcatctttggtgtttcctatgacgcggttctatctagttacgcgttaaaccaactagaa

SEQ ID NO: 1399 - RNA, 174 nt, synthetic construct
  source 1..174: mol_type = other RNA
gttcatcataggaaacaccaagtttaagagcggggaaatccgcaagtttaaataaggctagtccgttatcagcgtgaaaacgcggcaccgagtcggtgccaccattaaagaaaatatcatctttggtgtttcctatgcgcggttctatctagttacgcgttaaaccaactagaa

SEQ ID NO: 1400 - RNA, 174 nt, synthetic construct
  source 1..174: mol_type = other RNA
gttcatcataggaaacaccaagtttaagagcggggaaatccgcaagtttaaataaggctagtccgttatcagcgtgaaaacgcggcaccgagtcggtgcgcaccattaaagaaaatatcatctttggtgtttcctatcgcggttctatctagttacgcgttaaaccaactagaa

SEQ ID NO: 1401 - RNA, 174 nt, synthetic construct
  source 1..174: mol_type = other RNA
gttcatcataggaaacaccaagtttaagagcggggaaatccgcaagtttaaataaggctagtccgttatcagcgtgaaaacgcggcaccgagtcggtgcggcaccattaaagaaaatatcatctttggtgtttcctacgcggttctatctagttacgcgttaaaccaactagaa

SEQ ID NO: 1402 - RNA, 174 nt, synthetic construct
  source 1..174: mol_type = other RNA
gttcatcataggaaacaccaagtttaagagcggggaaatccgcaagtttaaataaggctagtccgttatcagcgtgaaaacgcggcaccgagtcggtgctggcaccattaaagaaaatatcatctttggtgtttcctcgcggttctatctagttacgcgttaaaccaactagaa

SEQ ID NO: 1403 - RNA, 174 nt, synthetic construct
  source 1..174: mol_type = other RNA
gttcatcataggaaacaccaagtttaagagcggggaaatccgcaagtttaaataaggctagtccgttatcagcgtgaaaacgcggcaccgagtcggtgcctggcaccattaaagaaaatatcatctttggtgtttcccgcggttctatctagttacgcgttaaaccaactagaa

SEQ ID NO: 1404 - RNA, 175 nt, synthetic construct
  source 1..175: mol_type = other RNA
gttcatcataggaaacaccaagttttagagctagaaatagcaagttaaaataaggctagtccgttatcaacttgaaaaagtggcaccgagtcggtgcattaaagaaaatatcatctttggtgtttcctatctacaattcgcggttctatctagttacgcgttaaaccaactagaa

SEQ ID NO: 1405 - RNA, 175 nt, synthetic construct
  source 1..175: mol_type = other RNA
gttcatcataggaaacaccaagttttagagctagaaatagcaagttaaaataaggctagtccgttatcaacttgaaaaagtggcaccgagtcggtgcattaaagaaaatatcatctttggtgtttcctatataaacttcgcggttctatctagttacgcgttaaaccaactagaa

SEQ ID NO: 1406 - RNA, 175 nt, synthetic construct
  source 1..175: mol_type = other RNA
gaccattaaagaaaatatcatgtttaagagctagaaatagcaagtttaaataaggctagtccgttatcagcgtgaaaacgcggcaccgagtcggtgcttcatcataggaaacaccaaagatgatattttctttaatttcgcggttctatctagttacgcgttaaaccaactagaa

SEQ ID NO: 1407 - RNA, 175 nt, synthetic construct
  source 1..175: mol_type = other RNA
gaccattaaagaaaatatcatgtttaagagctagaaatagcaagtttaaataaggctagtccgttatcagcgtgaaaacgcggcaccgagtcggtgcatcataggaaacaccaaagatgatattttctttaatgaattcgcggttctatctagttacgcgttaaaccaactagaa

SEQ ID NO: 1408 - RNA, 175 nt, synthetic construct
  source 1..175: mol_type = other RNA
gtctgtatctatattcatcatgtttaagagcggggaaatccgcaagtttaaataaggctagtccgttatcagcgtgaaaacgcggcaccgagtcggtgcatatcatctttggtgtttcctatgatgaatatagatacacgcggttctatctagttacgcgttaaaccaactagaa

SEQ ID NO: 1409 - RNA, 175 nt, synthetic construct
  source 1..175: mol_type = other RNA
gtctgtatctatattcatcatgtttaagagcggggaaatccgcaagtttaaataaggctagtccgttatcagcgtgaaaacgcggcaccgagtcggtgcaatatcatctttggtgtttcctatgatgaatatagataccgcggttctatctagttacgcgttaaaccaactagaa

SEQ ID NO: 1410 - RNA, 175 nt, synthetic construct
  source 1..175: mol_type = other RNA
gtctgtatctatattcatcatgtttaagagcggggaaatccgcaagtttaaataaggctagtccgttatcagcgtgaaaacgcggcaccgagtcggtgcaaatatcatctttggtgtttcctatgatgaatatagatacgcggttctatctagttacgcgttaaaccaactagaa

SEQ ID NO: 1411 - RNA, 175 nt, synthetic construct
  source 1..175: mol_type = other RNA
gtctgtatctatattcatcatgtttaagagcggggaaatccgcaagtttaaataaggctagtccgttatcagcgtgaaaacgcggcaccgagtcggtgcaaaatatcatctttggtgtttcctatgatgaatatagatcgcggttctatctagttacgcgttaaaccaactagaa

SEQ ID NO: 1412 - RNA, 175 nt, synthetic construct
  source 1..175: mol_type = other RNA
gtctgtatctatattcatcatgtttaagagcggggaaatccgcaagtttaaataaggctagtccgttatcagcgtgaaaacgcggcaccgagtcggtgcgaaaatatcatctttggtgtttcctatgatgaatatagacgcggttctatctagttacgcgttaaaccaactagaa

SEQ ID NO: 1413 - RNA, 175 nt, synthetic construct
  source 1..175: mol_type = other RNA
gtctgtatctatattcatcatgtttaagagcggggaaatccgcaagtttaaataaggctagtccgttatcagcgtgaaaacgcggcaccgagtcggtgcagaaaatatcatctttggtgtttcctatgatgaatatagcgcggttctatctagttacgcgttaaaccaactagaa

SEQ ID NO: 1414 - RNA, 175 nt, synthetic construct
  source 1..175: mol_type = other RNA
gtctgtatctatattcatcatgtttaagagcggggaaatccgcaagtttaaataaggctagtccgttatcagcgtgaaaacgcggcaccgagtcggtgcaagaaaatatcatctttggtgtttcctatgatgaatatacgcggttctatctagttacgcgttaaaccaactagaa

SEQ ID NO: 1415 - RNA, 175 nt, synthetic construct
  source 1..175: mol_type = other RNA
gtctgtatctatattcatcatgtttaagagcggggaaatccgcaagtttaaataaggctagtccgttatcagcgtgaaaacgcggcaccgagtcggtgcaaagaaaatatcatctttggtgtttcctatgatgaatatcgcggttctatctagttacgcgttaaaccaactagaa

SEQ ID NO: 1416 - RNA, 175 nt, synthetic construct
  source 1..175: mol_type = other RNA
gttcatcataggaaacaccaagtttaagagcggggaaatccgcaagtttaaataaggctagtccgttatcagcgtgaaaacgcggcaccgagtcggtgcccattaaagaaaatatcatctttggtgtttcctatgatgcgcggttctatctagttacgcgttaaaccaactagaa

SEQ ID NO: 1417 - RNA, 175 nt, synthetic construct
  source 1..175: mol_type = other RNA
gttcatcataggaaacaccaagtttaagagcggggaaatccgcaagtttaaataaggctagtccgttatcagcgtgaaaacgcggcaccgagtcggtgcaccattaaagaaaatatcatctttggtgtttcctatgatcgcggttctatctagttacgcgttaaaccaactagaa

SEQ ID NO: 1418 - RNA, 175 nt, synthetic construct
  source 1..175: mol_type = other RNA
gttcatcataggaaacaccaagtttaagagcggggaaatccgcaagtttaaataaggctagtccgttatcagcgtgaaaacgcggcaccgagtcggtgccaccattaaagaaaatatcatctttggtgtttcctatgacgcggttctatctagttacgcgttaaaccaactagaa

SEQ ID NO: 1419 - RNA, 175 nt, synthetic construct
  source 1..175: mol_type = other RNA
gttcatcataggaaacaccaagtttaagagcggggaaatccgcaagtttaaataaggctagtccgttatcagcgtgaaaacgcggcaccgagtcggtgcgcaccattaaagaaaatatcatctttggtgtttcctatgcgcggttctatctagttacgcgttaaaccaactagaa

SEQ ID NO: 1420 - RNA, 175 nt, synthetic construct
  source 1..175: mol_type = other RNA
gttcatcataggaaacaccaagtttaagagcggggaaatccgcaagtttaaataaggctagtccgttatcagcgtgaaaacgcggcaccgagtcggtgcggcaccattaaagaaaatatcatctttggtgtttcctatcgcggttctatctagttacgcgttaaaccaactagaa

SEQ ID NO: 1421 - RNA, 175 nt, synthetic construct
  source 1..175: mol_type = other RNA
gttcatcataggaaacaccaagtttaagagcggggaaatccgcaagtttaaataaggctagtccgttatcagcgtgaaaacgcggcaccgagtcggtgctggcaccattaaagaaaatatcatctttggtgtttcctacgcggttctatctagttacgcgttaaaccaactagaa

SEQ ID NO: 1422 - RNA, 175 nt, synthetic construct
  source 1..175: mol_type = other RNA
gttcatcataggaaacaccaagtttaagagcggggaaatccgcaagtttaaataaggctagtccgttatcagcgtgaaaacgcggcaccgagtcggtgcctggcaccattaaagaaaatatcatctttggtgtttcctcgcggttctatctagttacgcgttaaaccaactagaa

SEQ ID NO: 1423 - RNA, 175 nt, synthetic construct
  source 1..175: mol_type = other RNA
gttcatcataggaaacaccaagtttaagagcggggaaatccgcaagtttaaataaggctagtccgttatcagcgtgaaaacgcggcaccgagtcggtgccctggcaccattaaagaaaatatcatctttggtgtttcccgcggttctatctagttacgcgttaaaccaactagaa

SEQ ID NO: 1424 - RNA, 176 nt, synthetic construct
  source 1..176: mol_type = other RNA
gtctgtatctatattcatcatgtttaagagctagaaatagcaagtttaaataaggctagtccgttatcagcgtgaaaacgcggcaccgagtcggtgcgaaaatatcatctttggtgtttcctatgatgaatatagtattcgcggttctatctagttacgcgttaaaccaactagaa

SEQ ID NO: 1425 - RNA, 176 nt, synthetic construct
  source 1..176: mol_type = other RNA
gtctgtatctatattcatcatgtttaagagctagaaatagcaagtttaaataaggctagtccgttatcagcgtgaaaacgcggcaccgagtcggtgcaatatcatctttggtgtttcctatgatgaatatagataaattcgcggttctatctagttacgcgttaaaccaactagaa

SEQ ID NO: 1426 - RNA, 176 nt, synthetic construct
  source 1..176: mol_type = other RNA
gaccattaaagaaaatatcatgtttaagagcggggaaatccgcaagtttaaataaggctagtccgttatcagcgtgaaaacgcggcaccgagtcggtgccataagaaacaccaaagatgatattttctttaatggaggccgcggttctatctagttacgcgttaaaccaactagaa

SEQ ID NO: 1427 - RNA, 176 nt, synthetic construct
  source 1..176: mol_type = other RNA
gaccattaaagaaaatatcatgtttaagagcggggaaatccgcaagtttaaataaggctagtccgttatcagcgtgaaaacgcggcaccgagtcggtgccatacgaaacaccaaagatgatattttctttaatggagaccgcggttctatctagttacgcgttaaaccaactagaa

SEQ ID NO: 1428 - RNA, 176 nt, synthetic construct
  source 1..176: mol_type = other RNA
gaccattaaagaaaatatcatgtttaagagcggggaaatccgcaagtttaaataaggctagtccgttatcagcgtgaaaacgcggcaccgagtcggtgccataggaaacaccaaagataatattttctttaatggaaaccgcggttctatctagttacgcgttaaaccaactagaa

SEQ ID NO: 1429 - RNA, 176 nt, synthetic construct
  source 1..176: mol_type = other RNA
gaccattaaagaaaatatcatgtttaagagcggggaaatccgcaagtttaaataaggctagtccgttatcagcgtgaaaacgcggcaccgagtcggtgccataggaaacaccaaagatgatattttctttaatggaaaccgcggttctatctagttacgcgttaaaccaactagaa

SEQ ID NO: 1430 - RNA, 176 nt, synthetic construct
  source 1..176: mol_type = other RNA
gaccattaaagaaaatatcatgtttaagagcggggaaatccgcaagtttaaataaggctagtccgttatcagcgtgaaaacgcggcaccgagtcggtgccataggaaacaccaaagattatattttctttaatggaaaccgcggttctatctagttacgcgttaaaccaactagaa

SEQ ID NO: 1431 - RNA, 176 nt, synthetic construct
  source 1..176: mol_type = other RNA
gaccattaaagaaaatatcatgtttaagagcggggaaatccgcaagtttaaataaggctagtccgttatcagcgtgaaaacgcggcaccgagtcggtgccataggaaacaccgaagataatattttctttaatggataccgcggttctatctagttacgcgttaaaccaactagaa

SEQ ID NO: 1432 - RNA, 176 nt, synthetic construct
  source 1..176: mol_type = other RNA
gaccattaaagaaaatatcatgtttaagagcggggaaatccgcaagtttaaataaggctagtccgttatcagcgtgaaaacgcggcaccgagtcggtgccataggaaacaccgaagatgatattttctttaatggagaccgcggttctatctagttacgcgttaaaccaactagaa

SEQ ID NO: 1433 - RNA, 176 nt, synthetic construct
  source 1..176: mol_type = other RNA
gaccattaaagaaaatatcatgtttaagagcggggaaatccgcaagtttaaataaggctagtccgttatcagcgtgaaaacgcggcaccgagtcggtgccataggaaacaccgaagattatattttctttaatggaaaccgcggttctatctagttacgcgttaaaccaactagaa

SEQ ID NO: 1434 - RNA, 176 nt, synthetic construct
  source 1..176: mol_type = other RNA
gaccattaaagaaaatatcatgtttaagagcggggaaatccgcaagtttaaataaggctagtccgttatcagcgtgaaaacgcggcaccgagtcggtgccataggaaaccccaaagataatattttctttaatggagaccgcggttctatctagttacgcgttaaaccaactagaa

SEQ ID NO: 1435 - RNA, 176 nt, synthetic construct
  source 1..176: mol_type = other RNA
gaccattaaagaaaatatcatgtttaagagcggggaaatccgcaagtttaaataaggctagtccgttatcagcgtgaaaacgcggcaccgagtcggtgccataggaaaccccaaagatgatattttctttaatggagaccgcggttctatctagttacgcgttaaaccaactagaa

SEQ ID NO: 1436 - RNA, 176 nt, synthetic construct
  source 1..176: mol_type = other RNA
gaccattaaagaaaatatcatgtttaagagcggggaaatccgcaagtttaaataaggctagtccgttatcagcgtgaaaacgcggcaccgagtcggtgccataggaaaccccaaagattatattttctttaatggagaccgcggttctatctagttacgcgttaaaccaactagaa

SEQ ID NO: 1437 - RNA, 176 nt, synthetic construct
  source 1..176: mol_type = other RNA
gaccattaaagaaaatatcatgtttaagagcggggaaatccgcaagtttaaataaggctagtccgttatcagcgtgaaaacgcggcaccgagtcggtgccataggaaaccccgaagatgatattttctttaatggagaccgcggttctatctagttacgcgttaaaccaactagaa

SEQ ID NO: 1438 - RNA, 176 nt, synthetic construct
  source 1..176: mol_type = other RNA
gaccattaaagaaaatatcatgtttaagagcggggaaatccgcaagtttaaataaggctagtccgttatcagcgtgaaaacgcggcaccgagtcggtgccataggaaacgccaaagataatattttctttaatggaattcgcggttctatctagttacgcgttaaaccaactagaa

SEQ ID NO: 1439 - RNA, 176 nt, synthetic construct
  source 1..176: mol_type = other RNA
gaccattaaagaaaatatcatgtttaagagcggggaaatccgcaagtttaaataaggctagtccgttatcagcgtgaaaacgcggcaccgagtcggtgccataggaaacgccaaagatgatattttctttaatggaattcgcggttctatctagttacgcgttaaaccaactagaa

SEQ ID NO: 1440 - RNA, 176 nt, synthetic construct
  source 1..176: mol_type = other RNA
gaccattaaagaaaatatcatgtttaagagcggggaaatccgcaagtttaaataaggctagtccgttatcagcgtgaaaacgcggcaccgagtcggtgccataggaaacgccaaagattatattttctttaatggaattcgcggttctatctagttacgcgttaaaccaactagaa

SEQ ID NO: 1441 - RNA, 176 nt, synthetic construct
  source 1..176: mol_type = other RNA
gaccattaaagaaaatatcatgtttaagagcggggaaatccgcaagtttaaataaggctagtccgttatcagcgtgaaaacgcggcaccgagtcggtgccataggaaacgccgaagatgatattttctttaatggggatcgcggttctatctagttacgcgttaaaccaactagaa

SEQ ID NO: 1442 - RNA, 176 nt, synthetic construct
  source 1..176: mol_type = other RNA
gaccattaaagaaaatatcatgtttaagagcggggaaatccgcaagtttaaataaggctagtccgttatcagcgtgaaaacgcggcaccgagtcggtgccataggaaactccaaagataatattttctttaatggaaaccgcggttctatctagttacgcgttaaaccaactagaa

SEQ ID NO: 1443 - RNA, 176 nt, synthetic construct
  source 1..176: mol_type = other RNA
gaccattaaagaaaatatcatgtttaagagcggggaaatccgcaagtttaaataaggctagtccgttatcagcgtgaaaacgcggcaccgagtcggtgccataggaaactccaaagatgatattttctttaatggaaaccgcggttctatctagttacgcgttaaaccaactagaa

SEQ ID NO: 1444 - RNA, 176 nt, synthetic construct
  source 1..176: mol_type = other RNA
gaccattaaagaaaatatcatgtttaagagcggggaaatccgcaagtttaaataaggctagtccgttatcagcgtgaaaacgcggcaccgagtcggtgccataggaaactccaaagattatattttctttaatggaaaccgcggttctatctagttacgcgttaaaccaactagaa

SEQ ID NO: 1445 - RNA, 176 nt, synthetic construct
  source 1..176: mol_type = other RNA
gaccattaaagaaaatatcatgtttaagagcggggaaatccgcaagtttaaataaggctagtccgttatcagcgtgaaaacgcggcaccgagtcggtgccataggaaactccgaagatgatattttctttaatggatgccgcggttctatctagttacgcgttaaaccaactagaa

SEQ ID NO: 1446 - RNA, 176 nt, synthetic construct
  source 1..176: mol_type = other RNA
gaccattaaagaaaatatcatgtttaagagcggggaaatccgcaagtttaaataaggctagtccgttatcagcgtgaaaacgcggcaccgagtcggtgccataggacacaccaaagataatattttctttaatggaattcgcggttctatctagttacgcgttaaaccaactagaa

SEQ ID NO: 1447 - RNA, 176 nt, synthetic construct
  source 1..176: mol_type = other RNA
gaccattaaagaaaatatcatgtttaagagcggggaaatccgcaagtttaaataaggctagtccgttatcagcgtgaaaacgcggcaccgagtcggtgccataggacacaccaaagatgatattttctttaatggaaatcgcggttctatctagttacgcgttaaaccaactagaa

SEQ ID NO: 1448 - RNA, 176 nt, synthetic construct
  source 1..176: mol_type = other RNA
gaccattaaagaaaatatcatgtttaagagcggggaaatccgcaagtttaaataaggctagtccgttatcagcgtgaaaacgcggcaccgagtcggtgccataggacacaccaaagattatattttctttaatggagaccgcggttctatctagttacgcgttaaaccaactagaa

SEQ ID NO: 1449 - RNA, 176 nt, synthetic construct
  source 1..176: mol_type = other RNA
gaccattaaagaaaatatcatgtttaagagcggggaaatccgcaagtttaaataaggctagtccgttatcagcgtgaaaacgcggcaccgagtcggtgccataggacacaccgaagatgatattttctttaatggataccgcggttctatctagttacgcgttaaaccaactagaa

SEQ ID NO: 1450 - RNA, 176 nt, synthetic construct
  source 1..176: mol_type = other RNA
gaccattaaagaaaatatcatgtttaagagcggggaaatccgcaagtttaaataaggctagtccgttatcagcgtgaaaacgcggcaccgagtcggtgccataggacaccccaaagatgatattttctttaatggctatcgcggttctatctagttacgcgttaaaccaactagaa

SEQ ID NO: 1451 - RNA, 176 nt, synthetic construct
  source 1..176: mol_type = other RNA
gaccattaaagaaaatatcatgtttaagagcggggaaatccgcaagtttaaataaggctagtccgttatcagcgtgaaaacgcggcaccgagtcggtgccataggacacgccaaagatgatattttctttaatgggactcgcggttctatctagttacgcgttaaaccaactagaa

SEQ ID NO: 1452 - RNA, 176 nt, synthetic construct
  source 1..176: mol_type = other RNA
gaccattaaagaaaatatcatgtttaagagcggggaaatccgcaagtttaaataaggctagtccgttatcagcgtgaaaacgcggcaccgagtcggtgccataggacactccaaagatgatattttctttaatggctgccgcggttctatctagttacgcgttaaaccaactagaa

SEQ ID NO: 1453 - RNA, 176 nt, synthetic construct
  source 1..176: mol_type = other RNA
gaccattaaagaaaatatcatgtttaagagcggggaaatccgcaagtttaaataaggctagtccgttatcagcgtgaaaacgcggcaccgagtcggtgccataggagacaccaaagataatattttctttaatggagaccgcggttctatctagttacgcgttaaaccaactagaa

SEQ ID NO: 1454 - RNA, 176 nt, synthetic construct
  source 1..176: mol_type = other RNA
gaccattaaagaaaatatcatgtttaagagcggggaaatccgcaagtttaaataaggctagtccgttatcagcgtgaaaacgcggcaccgagtcggtgccataggagacaccaaagatgatattttctttaatggaaaccgcggttctatctagttacgcgttaaaccaactagaa

SEQ ID NO: 1455 - RNA, 176 nt, synthetic construct
  source 1..176: mol_type = other RNA
gaccattaaagaaaatatcatgtttaagagcggggaaatccgcaagtttaaataaggctagtccgttatcagcgtgaaaacgcggcaccgagtcggtgccataggagacaccaaagattatattttctttaatggaaaccgcggttctatctagttacgcgttaaaccaactagaa

SEQ ID NO: 1456 - RNA, 176 nt, synthetic construct
  source 1..176: mol_type = other RNA
gaccattaaagaaaatatcatgtttaagagcggggaaatccgcaagtttaaataaggctagtccgttatcagcgtgaaaacgcggcaccgagtcggtgccataggagacaccgaagatgatattttctttaatgggtaccgcggttctatctagttacgcgttaaaccaactagaa

SEQ ID NO: 1457 - RNA, 176 nt, synthetic construct
  source 1..176: mol_type = other RNA
gaccattaaagaaaatatcatgtttaagagcggggaaatccgcaagtttaaataaggctagtccgttatcagcgtgaaaacgcggcaccgagtcggtgccataggagaccccaaagatgatattttctttaatggagaccgcggttctatctagttacgcgttaaaccaactagaa

SEQ ID NO: 1458 - RNA, 176 nt, synthetic construct
  source 1..176: mol_type = other RNA
gaccattaaagaaaatatcatgtttaagagcggggaaatccgcaagtttaaataaggctagtccgttatcagcgtgaaaacgcggcaccgagtcggtgccataggagacgccaaagatgatattttctttaatggaattcgcggttctatctagttacgcgttaaaccaactagaa

SEQ ID NO: 1459 - RNA, 176 nt, synthetic construct
  source 1..176: mol_type = other RNA
gaccattaaagaaaatatcatgtttaagagcggggaaatccgcaagtttaaataaggctagtccgttatcagcgtgaaaacgcggcaccgagtcggtgccataggagactccaaagatgatattttctttaatggaaaccgcggttctatctagttacgcgttaaaccaactagaa

SEQ ID NO: 1460 - RNA, 176 nt, synthetic construct
  source 1..176: mol_type = other RNA
gaccattaaagaaaatatcatgtttaagagcggggaaatccgcaagtttaaataaggctagtccgttatcagcgtgaaaacgcggcaccgagtcggtgccataggatacaccaaagataatattttctttaatggagaccgcggttctatctagttacgcgttaaaccaactagaa

SEQ ID NO: 1461 - RNA, 176 nt, synthetic construct
  source 1..176: mol_type = other RNA
gaccattaaagaaaatatcatgtttaagagcggggaaatccgcaagtttaaataaggctagtccgttatcagcgtgaaaacgcggcaccgagtcggtgccataggatacaccaaagatgatattttctttaatggagaccgcggttctatctagttacgcgttaaaccaactagaa

SEQ ID NO: 1462 - RNA, 176 nt, synthetic construct
  source 1..176: mol_type = other RNA
gaccattaaagaaaatatcatgtttaagagcggggaaatccgcaagtttaaataaggctagtccgttatcagcgtgaaaacgcggcaccgagtcggtgccataggatacaccaaagattatattttctttaatggaaaccgcggttctatctagttacgcgttaaaccaactagaa

SEQ ID NO: 1463 - RNA, 176 nt, synthetic construct
  source 1..176: mol_type = other RNA
gaccattaaagaaaatatcatgtttaagagcggggaaatccgcaagtttaaataaggctagtccgttatcagcgtgaaaacgcggcaccgagtcggtgccataggatacaccgaagatgatattttctttaatggaaaccgcggttctatctagttacgcgttaaaccaactagaa

SEQ ID NO: 1464 - RNA, 176 nt, synthetic construct
  source 1..176: mol_type = other RNA
gaccattaaagaaaatatcatgtttaagagcggggaaatccgcaagtttaaataaggctagtccgttatcagcgtgaaaacgcggcaccgagtcggtgccataggataccccaaagatgatattttctttaatggaaaccgcggttctatctagttacgcgttaaaccaactagaa

SEQ ID NO: 1465 - RNA, 176 nt, synthetic construct
  source 1..176: mol_type = other RNA
gaccattaaagaaaatatcatgtttaagagcggggaaatccgcaagtttaaataaggctagtccgttatcagcgtgaaaacgcggcaccgagtcggtgccataggatacgccaaagatgatattttctttaatggattacgcggttctatctagttacgcgttaaaccaactagaa

SEQ ID NO: 1466 - RNA, 176 nt, synthetic construct
  source 1..176: mol_type = other RNA
gaccattaaagaaaatatcatgtttaagagcggggaaatccgcaagtttaaataaggctagtccgttatcagcgtgaaaacgcggcaccgagtcggtgccataggatactccaaagatgatattttctttaatggatgccgcggttctatctagttacgcgttaaaccaactagaa

SEQ ID NO: 1467 - RNA, 176 nt, synthetic construct
  source 1..176: mol_type = other RNA
gaccattaaagaaaatatcatgtttaagagcggggaaatccgcaagtttaaataaggctagtccgttatcagcgtgaaaacgcggcaccgagtcggtgccatatgaaacaccaaagatgatattttctttaatggatgccgcggttctatctagttacgcgttaaaccaactagaa

SEQ ID NO: 1468 - RNA, 176 nt, synthetic construct
  source 1..176: mol_type = other RNA
gaccattaaagaaaatatcatgtttaagagcggggaaatccgcaagtttaaataaggctagtccgttatcagcgtgaaaacgcggcaccgagtcggtgccgtaggaaacaccaaagatgatattttctttaatggcaatcgcggttctatctagttacgcgttaaaccaactagaa

SEQ ID NO: 1469 - RNA, 176 nt, synthetic construct
  source 1..176: mol_type = other RNA
gtctgtatctatattcatcatgtttaagagcggggaaatccgcaagtttaaataaggctagtccgttatcagcgtgaaaacgcggcaccgagtcggtgcaatatcatctttggtgtttcctatgatgaatatagatacacgcggttctatctagttacgcgttaaaccaactagaa

SEQ ID NO: 1470 - RNA, 176 nt, synthetic construct
  source 1..176: mol_type = other RNA
gtctgtatctatattcatcatgtttaagagcggggaaatccgcaagtttaaataaggctagtccgttatcagcgtgaaaacgcggcaccgagtcggtgcaaatatcatctttggtgtttcctatgatgaatatagataccgcggttctatctagttacgcgttaaaccaactagaa

SEQ ID NO: 1471 - RNA, 176 nt, synthetic construct
  source 1..176: mol_type = other RNA
gtctgtatctatattcatcatgtttaagagcggggaaatccgcaagtttaaataaggctagtccgttatcagcgtgaaaacgcggcaccgagtcggtgcaaaatatcatctttggtgtttcctatgatgaatatagatacgcggttctatctagttacgcgttaaaccaactagaa

SEQ ID NO: 1472 - RNA, 176 nt, synthetic construct
  source 1..176: mol_type = other RNA
gtctgtatctatattcatcatgtttaagagcggggaaatccgcaagtttaaataaggctagtccgttatcagcgtgaaaacgcggcaccgagtcggtgcgaaaatatcatctttggtgtttcctatgatgaatatagatcgcggttctatctagttacgcgttaaaccaactagaa

SEQ ID NO: 1473 - RNA, 176 nt, synthetic construct
  source 1..176: mol_type = other RNA
gtctgtatctatattcatcatgtttaagagcggggaaatccgcaagtttaaataaggctagtccgttatcagcgtgaaaacgcggcaccgagtcggtgcagaaaatatcatctttggtgtttcctatgatgaatatagacgcggttctatctagttacgcgttaaaccaactagaa

SEQ ID NO: 1474 - RNA, 176 nt, synthetic construct
  source 1..176: mol_type = other RNA
gtctgtatctatattcatcatgtttaagagcggggaaatccgcaagtttaaataaggctagtccgttatcagcgtgaaaacgcggcaccgagtcggtgcaagaaaatatcatctttggtgtttcctatgatgaatatagcgcggttctatctagttacgcgttaaaccaactagaa

SEQ ID NO: 1475 - RNA, 176 nt, synthetic construct
  source 1..176: mol_type = other RNA
gtctgtatctatattcatcatgtttaagagcggggaaatccgcaagtttaaataaggctagtccgttatcagcgtgaaaacgcggcaccgagtcggtgcaaagaaaatatcatctttggtgtttcctatgatgaatatacgcggttctatctagttacgcgttaaaccaactagaa

SEQ ID NO: 1476 - RNA, 176 nt, synthetic construct
  source 1..176: mol_type = other RNA
gtctgtatctatattcatcatgtttaagagcggggaaatccgcaagtttaaataaggctagtccgttatcagcgtgaaaacgcggcaccgagtcggtgctaaagaaaatatcatctttggtgtttcctatgatgaatatcgcggttctatctagttacgcgttaaaccaactagaa

SEQ ID NO: 1477 - RNA, 176 nt, synthetic construct
  source 1..176: mol_type = other RNA
gttcatcataggaaacaccaagtttaagagcggggaaatccgcaagtttaaataaggctagtccgttatcagcgtgaaaacgcggcaccgagtcggtgcaccattaaagaaaatatcatctttggtgtttcctatgatgcgcggttctatctagttacgcgttaaaccaactagaa

SEQ ID NO: 1478 - RNA, 176 nt, synthetic construct
  source 1..176: mol_type = other RNA
gttcatcataggaaacaccaagtttaagagcggggaaatccgcaagtttaaataaggctagtccgttatcagcgtgaaaacgcggcaccgagtcggtgccaccattaaagaaaatatcatctttggtgtttcctatgatcgcggttctatctagttacgcgttaaaccaactagaa

SEQ ID NO: 1479 - RNA, 176 nt, synthetic construct
  source 1..176: mol_type = other RNA
gttcatcataggaaacaccaagtttaagagcggggaaatccgcaagtttaaataaggctagtccgttatcagcgtgaaaacgcggcaccgagtcggtgcgcaccattaaagaaaatatcatctttggtgtttcctatgacgcggttctatctagttacgcgttaaaccaactagaa

SEQ ID NO: 1480 - RNA, 176 nt, synthetic construct
  source 1..176: mol_type = other RNA
gttcatcataggaaacaccaagtttaagagcggggaaatccgcaagtttaaataaggctagtccgttatcagcgtgaaaacgcggcaccgagtcggtgcggcaccattaaagaaaatatcatctttggtgtttcctatgcgcggttctatctagttacgcgttaaaccaactagaa

SEQ ID NO: 1481 - RNA, 176 nt, synthetic construct
  source 1..176: mol_type = other RNA
gttcatcataggaaacaccaagtttaagagcggggaaatccgcaagtttaaataaggctagtccgttatcagcgtgaaaacgcggcaccgagtcggtgctggcaccattaaagaaaatatcatctttggtgtttcctatcgcggttctatctagttacgcgttaaaccaactagaa

SEQ ID NO: 1482 - RNA, 176 nt, synthetic construct
  source 1..176: mol_type = other RNA
gttcatcataggaaacaccaagtttaagagcggggaaatccgcaagtttaaataaggctagtccgttatcagcgtgaaaacgcggcaccgagtcggtgcctggcaccattaaagaaaatatcatctttggtgtttcctacgcggttctatctagttacgcgttaaaccaactagaa

SEQ ID NO: 1483 - RNA, 176 nt, synthetic construct
  source 1..176: mol_type = other RNA
gttcatcataggaaacaccaagtttaagagcggggaaatccgcaagtttaaataaggctagtccgttatcagcgtgaaaacgcggcaccgagtcggtgccctggcaccattaaagaaaatatcatctttggtgtttcctcgcggttctatctagttacgcgttaaaccaactagaa

SEQ ID NO: 1484 - RNA, 176 nt, synthetic construct
  source 1..176: mol_type = other RNA
gttcatcataggaaacaccaagtttaagagcggggaaatccgcaagtttaaataaggctagtccgttatcagcgtgaaaacgcggcaccgagtcggtgcgcctggcaccattaaagaaaatatcatctttggtgtttcccgcggttctatctagttacgcgttaaaccaactagaa

SEQ ID NO: 1485 - RNA, 177 nt, synthetic construct
  source 1..177: mol_type = other RNA
gtctgtatctatattcatcatgtttaagagctagaaatagcaagtttaaataaggctagtccgttatcagcgtgaaaacgcggcaccgagtcggtgcaaagaaaatatcatctttggtgtttcctatgatgaatatccttcgcggttctatctagttacgcgttaaaccaactagaa

SEQ ID NO: 1486 - RNA, 177 nt, synthetic construct
  source 1..177: mol_type = other RNA
gtctgtatctatattcatcatgtttaagagcggggaaatccgcaagtttaaataaggctagtccgttatcagcgtgaaaacgcggcaccgagtcggtgcaaatatcatctttggtgtttcctatgatgaatatagatacacgcggttctatctagttacgcgttaaaccaactagaa

SEQ ID NO: 1487 - RNA, 177 nt, synthetic construct
  source 1..177: mol_type = other RNA
gtctgtatctatattcatcatgtttaagagcggggaaatccgcaagtttaaataaggctagtccgttatcagcgtgaaaacgcggcaccgagtcggtgcaaaatatcatctttggtgtttcctatgatgaatatagataccgcggttctatctagttacgcgttaaaccaactagaa

SEQ ID NO: 1488 - RNA, 177 nt, synthetic construct
  source 1..177: mol_type = other RNA
gtctgtatctatattcatcatgtttaagagcggggaaatccgcaagtttaaataaggctagtccgttatcagcgtgaaaacgcggcaccgagtcggtgcgaaaatatcatctttggtgtttcctatgatgaatatagatacgcggttctatctagttacgcgttaaaccaactagaa

SEQ ID NO: 1489 - RNA, 177 nt, synthetic construct
  source 1..177: mol_type = other RNA
gtctgtatctatattcatcatgtttaagagcggggaaatccgcaagtttaaataaggctagtccgttatcagcgtgaaaacgcggcaccgagtcggtgcagaaaatatcatctttggtgtttcctatgatgaatatagatcgcggttctatctagttacgcgttaaaccaactagaa

SEQ ID NO: 1490 - RNA, 177 nt, synthetic construct
  source 1..177: mol_type = other RNA
gtctgtatctatattcatcatgtttaagagcggggaaatccgcaagtttaaataaggctagtccgttatcagcgtgaaaacgcggcaccgagtcggtgcaagaaaatatcatctttggtgtttcctatgatgaatatagacgcggttctatctagttacgcgttaaaccaactagaa

SEQ ID NO: 1491 - RNA, 177 nt, synthetic construct
  source 1..177: mol_type = other RNA
gtctgtatctatattcatcatgtttaagagcggggaaatccgcaagtttaaataaggctagtccgttatcagcgtgaaaacgcggcaccgagtcggtgcaaagaaaatatcatctttggtgtttcctatgatgaatatagcgcggttctatctagttacgcgttaaaccaactagaa

SEQ ID NO: 1492 - RNA, 177 nt, synthetic construct
  source 1..177: mol_type = other RNA
gtctgtatctatattcatcatgtttaagagcggggaaatccgcaagtttaaataaggctagtccgttatcagcgtgaaaacgcggcaccgagtcggtgctaaagaaaatatcatctttggtgtttcctatgatgaatatacgcggttctatctagttacgcgttaaaccaactagaa

SEQ ID NO: 1493 - RNA, 177 nt, synthetic construct
  source 1..177: mol_type = other RNA
gtctgtatctatattcatcatgtttaagagcggggaaatccgcaagtttaaataaggctagtccgttatcagcgtgaaaacgcggcaccgagtcggtgcttaaagaaaatatcatctttggtgtttcctatgatgaatatcgcggttctatctagttacgcgttaaaccaactagaa

SEQ ID NO: 1494 - RNA, 177 nt, synthetic construct
  source 1..177: mol_type = other RNA
gcagttttcctggattatgccgtttaagagcggggaaatccgcaagtttaaataaggctagtccgttatcagcgtgaaaacgcggcaccgagtcggtgcccaaagatgatattttctttaatggtgccaggcataatccacgcggttctatctagttacgcgttaaaccaactagaa

SEQ ID NO: 1495 - RNA, 177 nt, synthetic construct
  source 1..177: mol_type = other RNA
gttcatcataggaaacaccaagtttaagagcggggaaatccgcaagtttaaataaggctagtccgttatcagcgtgaaaacgcggcaccgagtcggtgccaccattaaagaaaatatcatctttggtgtttcctatgatgcgcggttctatctagttacgcgttaaaccaactagaa

SEQ ID NO: 1496 - RNA, 177 nt, synthetic construct
  source 1..177: mol_type = other RNA
gttcatcataggaaacaccaagtttaagagcggggaaatccgcaagtttaaataaggctagtccgttatcagcgtgaaaacgcggcaccgagtcggtgcgcaccattaaagaaaatatcatctttggtgtttcctatgatcgcggttctatctagttacgcgttaaaccaactagaa

SEQ ID NO: 1497 - RNA, 177 nt, synthetic construct
  source 1..177: mol_type = other RNA
gttcatcataggaaacaccaagtttaagagcggggaaatccgcaagtttaaataaggctagtccgttatcagcgtgaaaacgcggcaccgagtcggtgcggcaccattaaagaaaatatcatctttggtgtttcctatgacgcggttctatctagttacgcgttaaaccaactagaa

SEQ ID NO: 1498 - RNA, 177 nt, synthetic construct
  source 1..177: mol_type = other RNA
gttcatcataggaaacaccaagtttaagagcggggaaatccgcaagtttaaataaggctagtccgttatcagcgtgaaaacgcggcaccgagtcggtgctggcaccattaaagaaaatatcatctttggtgtttcctatgcgcggttctatctagttacgcgttaaaccaactagaa

SEQ ID NO: 1499 - RNA, 177 nt, synthetic construct
  source 1..177: mol_type = other RNA
gttcatcataggaaacaccaagtttaagagcggggaaatccgcaagtttaaataaggctagtccgttatcagcgtgaaaacgcggcaccgagtcggtgcctggcaccattaaagaaaatatcatctttggtgtttcctatcgcggttctatctagttacgcgttaaaccaactagaa

SEQ ID NO: 1500 - RNA, 177 nt, synthetic construct
  source 1..177: mol_type = other RNA
gttcatcataggaaacaccaagtttaagagcggggaaatccgcaagtttaaataaggctagtccgttatcagcgtgaaaacgcggcaccgagtcggtgccctggcaccattaaagaaaatatcatctttggtgtttcctacgcggttctatctagttacgcgttaaaccaactagaa

SEQ ID NO: 1501 - RNA, 177 nt, synthetic construct
  source 1..177: mol_type = other RNA
gttcatcataggaaacaccaagtttaagagcggggaaatccgcaagtttaaataaggctagtccgttatcagcgtgaaaacgcggcaccgagtcggtgcgcctggcaccattaaagaaaatatcatctttggtgtttcctcgcggttctatctagttacgcgttaaaccaactagaa

SEQ ID NO: 1502 - RNA, 177 nt, synthetic construct
  source 1..177: mol_type = other RNA
gttcatcataggaaacaccaagtttaagagcggggaaatccgcaagtttaaataaggctagtccgttatcagcgtgaaaacgcggcaccgagtcggtgctgcctggcaccattaaagaaaatatcatctttggtgtttcccgcggttctatctagttacgcgttaaaccaactagaa

SEQ ID NO: 1503 - RNA, 178 nt, synthetic construct
  source 1..178: mol_type = other RNA
gtctgtatctatattcatcatgtttaagagctagaaatagcaagtttaaataaggctagtccgttatcagcgtgaaaacgcggcaccgagtcggtgcaatatcatctttggtgtttcctatgatgaatatagatacaagctcgcggttctatctagttacgcgttaaaccaactagaa

SEQ ID NO: 1504 - RNA, 178 nt, synthetic construct
  source 1..178: mol_type = other RNA
gaccattaaagaaaatatcatgtttaagagctagaaatagcaagtttaaataaggctagtccgttatcagcgtgaaaacgcggcaccgagtcggtgcttcatcataggaaacaccaaagatgatattttctttaatgacaccgcggttctatctagttacgcgttaaaccaactagaa

SEQ ID NO: 1505 - RNA, 178 nt, synthetic construct
  source 1..178: mol_type = other RNA
gtctgtatctatattcatcatgtttaagagcggggaaatccgcaagtttaaataaggctagtccgttatcagcgtgaaaacgcggcaccgagtcggtgcaaaatatcatctttggtgtttcctatgatgaatatagatacacgcggttctatctagttacgcgttaaaccaactagaa

SEQ ID NO: 1506 - RNA, 178 nt, synthetic construct
  source 1..178: mol_type = other RNA
gtctgtatctatattcatcatgtttaagagcggggaaatccgcaagtttaaataaggctagtccgttatcagcgtgaaaacgcggcaccgagtcggtgcgaaaatatcatctttggtgtttcctatgatgaatatagataccgcggttctatctagttacgcgttaaaccaactagaa

SEQ ID NO: 1507 - RNA, 178 nt, synthetic construct
  source 1..178: mol_type = other RNA
gtctgtatctatattcatcatgtttaagagcggggaaatccgcaagtttaaataaggctagtccgttatcagcgtgaaaacgcggcaccgagtcggtgcagaaaatatcatctttggtgtttcctatgatgaatatagatacgcggttctatctagttacgcgttaaaccaactagaa

SEQ ID NO: 1508 - RNA, 178 nt, synthetic construct
  source 1..178: mol_type = other RNA
gtctgtatctatattcatcatgtttaagagcggggaaatccgcaagtttaaataaggctagtccgttatcagcgtgaaaacgcggcaccgagtcggtgcaagaaaatatcatctttggtgtttcctatgatgaatatagatcgcggttctatctagttacgcgttaaaccaactagaa

SEQ ID NO: 1509 - RNA, 178 nt, synthetic construct
  source 1..178: mol_type = other RNA
gtctgtatctatattcatcatgtttaagagcggggaaatccgcaagtttaaataaggctagtccgttatcagcgtgaaaacgcggcaccgagtcggtgcaaagaaaatatcatctttggtgtttcctatgatgaatatagacgcggttctatctagttacgcgttaaaccaactagaa

SEQ ID NO: 1510 - RNA, 178 nt, synthetic construct
  source 1..178: mol_type = other RNA
gtctgtatctatattcatcatgtttaagagcggggaaatccgcaagtttaaataaggctagtccgttatcagcgtgaaaacgcggcaccgagtcggtgctaaagaaaatatcatctttggtgtttcctatgatgaatatagcgcggttctatctagttacgcgttaaaccaactagaa

SEQ ID NO: 1511 - RNA, 178 nt, synthetic construct
  source 1..178: mol_type = other RNA
gtctgtatctatattcatcatgtttaagagcggggaaatccgcaagtttaaataaggctagtccgttatcagcgtgaaaacgcggcaccgagtcggtgcttaaagaaaatatcatctttggtgtttcctatgatgaatatacgcggttctatctagttacgcgttaaaccaactagaa

SEQ ID NO: 1512 - RNA, 178 nt, synthetic construct
  source 1..178: mol_type = other RNA
gtctgtatctatattcatcatgtttaagagcggggaaatccgcaagtttaaataaggctagtccgttatcagcgtgaaaacgcggcaccgagtcggtgcattaaagaaaatatcatctttggtgtttcctatgatgaatatcgcggttctatctagttacgcgttaaaccaactagaa

SEQ ID NO: 1513 - RNA, 178 nt, synthetic construct
  source 1..178: mol_type = other RNA
gcagttttcctggattatgccgtttaagagcggggaaatccgcaagtttaaataaggctagtccgttatcagcgtgaaaacgcggcaccgagtcggtgcccaaagatgatattttctttaatggtgccaggcataatccagcgcggttctatctagttacgcgttaaaccaactagaa

SEQ ID NO: 1514 - RNA, 178 nt, synthetic construct
  source 1..178: mol_type = other RNA
gcagttttcctggattatgccgtttaagagcggggaaatccgcaagtttaaataaggctagtccgttatcagcgtgaaaacgcggcaccgagtcggtgcaccaaagatgatattttctttaatggtgccaggcataatccacgcggttctatctagttacgcgttaaaccaactagaa

SEQ ID NO: 1515 - RNA, 178 nt, synthetic construct
  source 1..178: mol_type = other RNA
gttcatcataggaaacaccaagtttaagagcggggaaatccgcaagtttaaataaggctagtccgttatcagcgtgaaaacgcggcaccgagtcggtgcgcaccattaaagaaaatatcatctttggtgtttcctatgatgcgcggttctatctagttacgcgttaaaccaactagaa

SEQ ID NO: 1516 - RNA, 178 nt, synthetic construct
  source 1..178: mol_type = other RNA
gttcatcataggaaacaccaagtttaagagcggggaaatccgcaagtttaaataaggctagtccgttatcagcgtgaaaacgcggcaccgagtcggtgcggcaccattaaagaaaatatcatctttggtgtttcctatgatcgcggttctatctagttacgcgttaaaccaactagaa

SEQ ID NO: 1517 - RNA, 178 nt, synthetic construct
  source 1..178: mol_type = other RNA
gttcatcataggaaacaccaagtttaagagcggggaaatccgcaagtttaaataaggctagtccgttatcagcgtgaaaacgcggcaccgagtcggtgctggcaccattaaagaaaatatcatctttggtgtttcctatgacgcggttctatctagttacgcgttaaaccaactagaa

SEQ ID NO: 1518 - RNA, 178 nt, synthetic construct
  source 1..178: mol_type = other RNA
gttcatcataggaaacaccaagtttaagagcggggaaatccgcaagtttaaataaggctagtccgttatcagcgtgaaaacgcggcaccgagtcggtgcctggcaccattaaagaaaatatcatctttggtgtttcctatgcgcggttctatctagttacgcgttaaaccaactagaa

SEQ ID NO: 1519 - RNA, 178 nt, synthetic construct
  source 1..178: mol_type = other RNA
gttcatcataggaaacaccaagtttaagagcggggaaatccgcaagtttaaataaggctagtccgttatcagcgtgaaaacgcggcaccgagtcggtgccctggcaccattaaagaaaatatcatctttggtgtttcctatcgcggttctatctagttacgcgttaaaccaactagaa

SEQ ID NO: 1520 - RNA, 178 nt, synthetic construct
  source 1..178: mol_type = other RNA
gttcatcataggaaacaccaagtttaagagcggggaaatccgcaagtttaaataaggctagtccgttatcagcgtgaaaacgcggcaccgagtcggtgcgcctggcaccattaaagaaaatatcatctttggtgtttcctacgcggttctatctagttacgcgttaaaccaactagaa

SEQ ID NO: 1521 - RNA, 178 nt, synthetic construct
  source 1..178: mol_type = other RNA
gttcatcataggaaacaccaagtttaagagcggggaaatccgcaagtttaaataaggctagtccgttatcagcgtgaaaacgcggcaccgagtcggtgctgcctggcaccattaaagaaaatatcatctttggtgtttcctcgcggttctatctagttacgcgttaaaccaactagaa

SEQ ID NO: 1522 - RNA, 178 nt, synthetic construct
  source 1..178: mol_type = other RNA
gttcatcataggaaacaccaagtttaagagcggggaaatccgcaagtttaaataaggctagtccgttatcagcgtgaaaacgcggcaccgagtcggtgcatgcctggcaccattaaagaaaatatcatctttggtgtttcccgcggttctatctagttacgcgttaaaccaactagaa

SEQ ID NO: 1523 - RNA, 179 nt, synthetic construct
  source 1..179: mol_type = other RNA
gtctgtatctatattcatcatgtttaagagctagaaatagcaagtttaaataaggctagtccgttatcagcgtgaaaacgcggcaccgagtcggtgcaaagaaaatatcatctttggtgtttcctatgatgaatatagagttcgcggttctatctagttacgcgttaaaccaactagaa

SEQ ID NO: 1524 - RNA, 179 nt, synthetic construct
  source 1..179: mol_type = other RNA
gtctgtatctatattcatcatgtttaagagctagaaatagcaagtttaaataaggctagtccgttatcagcgtgaaaacgcggcaccgagtcggtgcgaaaatatcatctttggtgtttcctatgatgaatatagatatactcgcggttctatctagttacgcgttaaaccaactagaa

SEQ ID NO: 1525 - RNA, 179 nt, synthetic construct
  source 1..179: mol_type = other RNA
gcagttttcctggattatgccgtttaagagctagaaatagcaagtttaaataaggctagtccgttatcagcgtgaaaacgcggcaccgagtcggtgcaccaaagatgatattttctttaatggtgccaggcataatccatctcgcggttctatctagttacgcgttaaaccaactagaa

SEQ ID NO: 1526 - RNA, 179 nt, synthetic construct
  source 1..179: mol_type = other RNA
gtctgtatctatattcatcatgtttaagagcggggaaatccgcaagtttaaataaggctagtccgttatcagcgtgaaaacgcggcaccgagtcggtgcgaaaatatcatctttggtgtttcctatgatgaatatagatacacgcggttctatctagttacgcgttaaaccaactagaa

SEQ ID NO: 1527 - RNA, 179 nt, synthetic construct
  source 1..179: mol_type = other RNA
gtctgtatctatattcatcatgtttaagagcggggaaatccgcaagtttaaataaggctagtccgttatcagcgtgaaaacgcggcaccgagtcggtgcagaaaatatcatctttggtgtttcctatgatgaatatagataccgcggttctatctagttacgcgttaaaccaactagaa

SEQ ID NO: 1528 - RNA, 179 nt, synthetic construct
  source 1..179: mol_type = other RNA
gtctgtatctatattcatcatgtttaagagcggggaaatccgcaagtttaaataaggctagtccgttatcagcgtgaaaacgcggcaccgagtcggtgcaagaaaatatcatctttggtgtttcctatgatgaatatagatacgcggttctatctagttacgcgttaaaccaactagaa

SEQ ID NO: 1529 - RNA, 179 nt, synthetic construct
  source 1..179: mol_type = other RNA
gtctgtatctatattcatcatgtttaagagcggggaaatccgcaagtttaaataaggctagtccgttatcagcgtgaaaacgcggcaccgagtcggtgcaaagaaaatatcatctttggtgtttcctatgatgaatatagatcgcggttctatctagttacgcgttaaaccaactagaa

SEQ ID NO: 1530 - RNA, 179 nt, synthetic construct
  source 1..179: mol_type = other RNA
gtctgtatctatattcatcatgtttaagagcggggaaatccgcaagtttaaataaggctagtccgttatcagcgtgaaaacgcggcaccgagtcggtgctaaagaaaatatcatctttggtgtttcctatgatgaatatagacgcggttctatctagttacgcgttaaaccaactagaa

SEQ ID NO: 1531 - RNA, 179 nt, synthetic construct
  source 1..179: mol_type = other RNA
gtctgtatctatattcatcatgtttaagagcggggaaatccgcaagtttaaataaggctagtccgttatcagcgtgaaaacgcggcaccgagtcggtgcttaaagaaaatatcatctttggtgtttcctatgatgaatatagcgcggttctatctagttacgcgttaaaccaactagaa

SEQ ID NO: 1532 - RNA, 179 nt, synthetic construct
  source 1..179: mol_type = other RNA
gtctgtatctatattcatcatgtttaagagcggggaaatccgcaagtttaaataaggctagtccgttatcagcgtgaaaacgcggcaccgagtcggtgcattaaagaaaatatcatctttggtgtttcctatgatgaatatacgcggttctatctagttacgcgttaaaccaactagaa

SEQ ID NO: 1533 - RNA, 179 nt, synthetic construct
  source 1..179: mol_type = other RNA
gtctgtatctatattcatcatgtttaagagcggggaaatccgcaagtttaaataaggctagtccgttatcagcgtgaaaacgcggcaccgagtcggtgccattaaagaaaatatcatctttggtgtttcctatgatgaatatcgcggttctatctagttacgcgttaaaccaactagaa

SEQ ID NO: 1534 - RNA, 179 nt, synthetic construct
  source 1..179: mol_type = other RNA
gcagttttcctggattatgccgtttaagagcggggaaatccgcaagtttaaataaggctagtccgttatcagcgtgaaaacgcggcaccgagtcggtgcccaaagatgatattttctttaatggtgccaggcataatccaggcgcggttctatctagttacgcgttaaaccaactagaa

SEQ ID NO: 1535 - RNA, 179 nt, synthetic construct
  source 1..179: mol_type = other RNA
gcagttttcctggattatgccgtttaagagcggggaaatccgcaagtttaaataaggctagtccgttatcagcgtgaaaacgcggcaccgagtcggtgcaccaaagatgatattttctttaatggtgccaggcataatccagcgcggttctatctagttacgcgttaaaccaactagaa

SEQ ID NO: 1536 - RNA, 179 nt, synthetic construct
  source 1..179: mol_type = other RNA
gcagttttcctggattatgccgtttaagagcggggaaatccgcaagtttaaataaggctagtccgttatcagcgtgaaaacgcggcaccgagtcggtgccaccaaagatgatattttctttaatggtgccaggcataatccacgcggttctatctagttacgcgttaaaccaactagaa

SEQ ID NO: 1537 - RNA, 179 nt, synthetic construct
  source 1..179: mol_type = other RNA
gttcatcataggaaacaccaagtttaagagcggggaaatccgcaagtttaaataaggctagtccgttatcagcgtgaaaacgcggcaccgagtcggtgcggcaccattaaagaaaatatcatctttggtgtttcctatgatgcgcggttctatctagttacgcgttaaaccaactagaa

SEQ ID NO: 1538 - RNA, 179 nt, synthetic construct
  source 1..179: mol_type = other RNA
gttcatcataggaaacaccaagtttaagagcggggaaatccgcaagtttaaataaggctagtccgttatcagcgtgaaaacgcggcaccgagtcggtgctggcaccattaaagaaaatatcatctttggtgtttcctatgatcgcggttctatctagttacgcgttaaaccaactagaa

SEQ ID NO: 1539 - RNA, 179 nt, synthetic construct
  source 1..179: mol_type = other RNA
gttcatcataggaaacaccaagtttaagagcggggaaatccgcaagtttaaataaggctagtccgttatcagcgtgaaaacgcggcaccgagtcggtgcctggcaccattaaagaaaatatcatctttggtgtttcctatgacgcggttctatctagttacgcgttaaaccaactagaa

SEQ ID NO: 1540 - RNA, 179 nt, synthetic construct
  source 1..179: mol_type = other RNA
gttcatcataggaaacaccaagtttaagagcggggaaatccgcaagtttaaataaggctagtccgttatcagcgtgaaaacgcggcaccgagtcggtgccctggcaccattaaagaaaatatcatctttggtgtttcctatgcgcggttctatctagttacgcgttaaaccaactagaa

SEQ ID NO: 1541 - RNA, 179 nt, synthetic construct
  source 1..179: mol_type = other RNA
gttcatcataggaaacaccaagtttaagagcggggaaatccgcaagtttaaataaggctagtccgttatcagcgtgaaaacgcggcaccgagtcggtgcgcctggcaccattaaagaaaatatcatctttggtgtttcctatcgcggttctatctagttacgcgttaaaccaactagaa

SEQ ID NO: 1542 - RNA, 179 nt, synthetic construct
  source 1..179: mol_type = other RNA
gttcatcataggaaacaccaagtttaagagcggggaaatccgcaagtttaaataaggctagtccgttatcagcgtgaaaacgcggcaccgagtcggtgctgcctggcaccattaaagaaaatatcatctttggtgtttcctacgcggttctatctagttacgcgttaaaccaactagaa

SEQ ID NO: 1543 - RNA, 179 nt, synthetic construct
  source 1..179: mol_type = other RNA
gttcatcataggaaacaccaagtttaagagcggggaaatccgcaagtttaaataaggctagtccgttatcagcgtgaaaacgcggcaccgagtcggtgcatgcctggcaccattaaagaaaatatcatctttggtgtttcctcgcggttctatctagttacgcgttaaaccaactagaa

SEQ ID NO: 1544 - RNA, 179 nt, synthetic construct
  source 1..179: mol_type = other RNA
gttcatcataggaaacaccaagtttaagagcggggaaatccgcaagtttaaataaggctagtccgttatcagcgtgaaaacgcggcaccgagtcggtgctatgcctggcaccattaaagaaaatatcatctttggtgtttcccgcggttctatctagttacgcgttaaaccaactagaa

SEQ ID NO: 1545 - RNA, 180 nt, synthetic construct
  source 1..180: mol_type = other RNA
gtctgtatctatattcatcatgtttaagagctagaaatagcaagtttaaataaggctagtccgttatcagcgtgaaaacgcggcaccgagtcggtgcattaaagaaaatatcatctttggtgtttcctatgatgaatataattcgcggttctatctagttacgcgttaaaccaactagaa

SEQ ID NO: 1546 - RNA, 180 nt, synthetic construct
  source 1..180: mol_type = other RNA
gtctgtatctatattcatcatgtttaagagcggggaaatccgcaagtttaaataaggctagtccgttatcagcgtgaaaacgcggcaccgagtcggtgcgaaaacatcatctttggtgtttcctatgatgaatatagatgtaccgcggttctatctagttacgcgttaaaccaactagaa

SEQ ID NO: 1547 - RNA, 180 nt, synthetic construct
  source 1..180: mol_type = other RNA
gtctgtatctatattcatcatgtttaagagcggggaaatccgcaagtttaaataaggctagtccgttatcagcgtgaaaacgcggcaccgagtcggtgcgaaaatataatctttggtgtttcctatgatgaatatagattactcgcggttctatctagttacgcgttaaaccaactagaa

SEQ ID NO: 1548 - RNA, 180 nt, synthetic construct
  source 1..180: mol_type = other RNA
gtctgtatctatattcatcatgtttaagagcggggaaatccgcaagtttaaataaggctagtccgttatcagcgtgaaaacgcggcaccgagtcggtgcgaaaatatcatcttcggtgtttcctatgatgaatatagattactcgcggttctatctagttacgcgttaaaccaactagaa

SEQ ID NO: 1549 - RNA, 180 nt, synthetic construct
  source 1..180: mol_type = other RNA
gtctgtatctatattcatcatgtttaagagcggggaaatccgcaagtttaaataaggctagtccgttatcagcgtgaaaacgcggcaccgagtcggtgcgaaaatatcatctttggagtttcctatgatgaatatagattactcgcggttctatctagttacgcgttaaaccaactagaa

SEQ ID NO: 1550 - RNA, 180 nt, synthetic construct
  source 1..180: mol_type = other RNA
gtctgtatctatattcatcatgtttaagagcggggaaatccgcaagtttaaataaggctagtccgttatcagcgtgaaaacgcggcaccgagtcggtgcgaaaatatcatctttggcgtttcctatgatgaatatagattatccgcggttctatctagttacgcgttaaaccaactagaa

SEQ ID NO: 1551 - RNA, 180 nt, synthetic construct
  source 1..180: mol_type = other RNA
gtctgtatctatattcatcatgtttaagagcggggaaatccgcaagtttaaataaggctagtccgttatcagcgtgaaaacgcggcaccgagtcggtgcgaaaatatcatctttggggtttcctatgatgaatatagattactcgcggttctatctagttacgcgttaaaccaactagaa

SEQ ID NO: 1552 - RNA, 180 nt, synthetic construct
  source 1..180: mol_type = other RNA
gtctgtatctatattcatcatgtttaagagcggggaaatccgcaagtttaaataaggctagtccgttatcagcgtgaaaacgcggcaccgagtcggtgcgaaaatatcatctttggtgtatcctatgatgaatatagattattcgcggttctatctagttacgcgttaaaccaactagaa

SEQ ID NO: 1553 - RNA, 180 nt, synthetic construct
  source 1..180: mol_type = other RNA
gtctgtatctatattcatcatgtttaagagcggggaaatccgcaagtttaaataaggctagtccgttatcagcgtgaaaacgcggcaccgagtcggtgcgaaaatatcatctttggtgtctcctatgatgaatatagattactcgcggttctatctagttacgcgttaaaccaactagaa

SEQ ID NO: 1554 - RNA, 180 nt, synthetic construct
  source 1..180: mol_type = other RNA
gtctgtatctatattcatcatgtttaagagcggggaaatccgcaagtttaaataaggctagtccgttatcagcgtgaaaacgcggcaccgagtcggtgcgaaaatatcatctttggtgtgtcctatgatgaatatagatgatccgcggttctatctagttacgcgttaaaccaactagaa

SEQ ID NO: 1555 - RNA, 180 nt, synthetic construct
  source 1..180: mol_type = other RNA
gtctgtatctatattcatcatgtttaagagcggggaaatccgcaagtttaaataaggctagtccgttatcagcgtgaaaacgcggcaccgagtcggtgcgaaaatatcatctttggtgtttcatatgatgaatatagatttcccgcggttctatctagttacgcgttaaaccaactagaa

SEQ ID NO: 1556 - RNA, 180 nt, synthetic construct
  source 1..180: mol_type = other RNA
gtctgtatctatattcatcatgtttaagagcggggaaatccgcaagtttaaataaggctagtccgttatcagcgtgaaaacgcggcaccgagtcggtgcgaaaatatcatctttggtgtttcctacgatgaatatagatgtaccgcggttctatctagttacgcgttaaaccaactagaa

SEQ ID NO: 1557 - RNA, 180 nt, synthetic construct
  source 1..180: mol_type = other RNA
gtctgtatctatattcatcatgtttaagagcggggaaatccgcaagtttaaataaggctagtccgttatcagcgtgaaaacgcggcaccgagtcggtgcgaaaatatcatctttggtgtttcctatgatgaatatagattactcgcggttctatctagttacgcgttaaaccaactagaa

SEQ ID NO: 1558 - RNA, 180 nt, synthetic construct
  source 1..180: mol_type = other RNA
gtctgtatctatattcatcatgtttaagagcggggaaatccgcaagtttaaataaggctagtccgttatcagcgtgaaaacgcggcaccgagtcggtgcgaaaatatcatctttggtgtttcgtatgatgaatatagatgatccgcggttctatctagttacgcgttaaaccaactagaa

SEQ ID NO: 1559 - RNA, 180 nt, synthetic construct
  source 1..180: mol_type = other RNA
gtctgtatctatattcatcatgtttaagagcggggaaatccgcaagtttaaataaggctagtccgttatcagcgtgaaaacgcggcaccgagtcggtgcgaaaatatcatctttggtgtttcttatgatgaatatagatttcccgcggttctatctagttacgcgttaaaccaactagaa

SEQ ID NO: 1560 - RNA, 180 nt, synthetic construct
  source 1..180: mol_type = other RNA
gtctgtatctatattcatcatgtttaagagcggggaaatccgcaagtttaaataaggctagtccgttatcagcgtgaaaacgcggcaccgagtcggtgcgaaaatattatctttggtgtttcctatgatgaatatagattactcgcggttctatctagttacgcgttaaaccaactagaa

SEQ ID NO: 1561 - RNA, 180 nt, synthetic construct
  source 1..180: mol_type = other RNA
gtctgtatctatattcatcatgtttaagagcggggaaatccgcaagtttaaataaggctagtccgttatcagcgtgaaaacgcggcaccgagtcggtgcgagaatatcatctttggtgtttcctatgatgaatatagatgtgccgcggttctatctagttacgcgttaaaccaactagaa

SEQ ID NO: 1562 - RNA, 180 nt, synthetic construct
  source 1..180: mol_type = other RNA
gtctgtatctatattcatcatgtttaagagcggggaaatccgcaagtttaaataaggctagtccgttatcagcgtgaaaacgcggcaccgagtcggtgcagaaaatatcatctttggtgtttcctatgatgaatatagatacacgcggttctatctagttacgcgttaaaccaactagaa

SEQ ID NO: 1563 - RNA, 180 nt, synthetic construct
  source 1..180: mol_type = other RNA
gtctgtatctatattcatcatgtttaagagcggggaaatccgcaagtttaaataaggctagtccgttatcagcgtgaaaacgcggcaccgagtcggtgcaagaaaatatcatctttggtgtttcctatgatgaatatagataccgcggttctatctagttacgcgttaaaccaactagaa

SEQ ID NO: 1564 - RNA, 180 nt, synthetic construct
  source 1..180: mol_type = other RNA
gtctgtatctatattcatcatgtttaagagcggggaaatccgcaagtttaaataaggctagtccgttatcagcgtgaaaacgcggcaccgagtcggtgcaaagaaaatatcatctttggtgtttcctatgatgaatatagatacgcggttctatctagttacgcgttaaaccaactagaa

SEQ ID NO: 1565 - RNA, 180 nt, synthetic construct
  source 1..180: mol_type = other RNA
gtctgtatctatattcatcatgtttaagagcggggaaatccgcaagtttaaataaggctagtccgttatcagcgtgaaaacgcggcaccgagtcggtgctaaagaaaatatcatctttggtgtttcctatgatgaatatagatcgcggttctatctagttacgcgttaaaccaactagaa

SEQ ID NO: 1566 - RNA, 180 nt, synthetic construct
  source 1..180: mol_type = other RNA
gtctgtatctatattcatcatgtttaagagcggggaaatccgcaagtttaaataaggctagtccgttatcagcgtgaaaacgcggcaccgagtcggtgcttaaagaaaatatcatctttggtgtttcctatgatgaatatagacgcggttctatctagttacgcgttaaaccaactagaa

SEQ ID NO: 1567 - RNA, 180 nt, synthetic construct
  source 1..180: mol_type = other RNA
gtctgtatctatattcatcatgtttaagagcggggaaatccgcaagtttaaataaggctagtccgttatcagcgtgaaaacgcggcaccgagtcggtgcattaaagaaaatatcatctttggtgtttcctatgatgaatatagcgcggttctatctagttacgcgttaaaccaactagaa

SEQ ID NO: 1568 - RNA, 180 nt, synthetic construct
  source 1..180: mol_type = other RNA
gtctgtatctatattcatcatgtttaagagcggggaaatccgcaagtttaaataaggctagtccgttatcagcgtgaaaacgcggcaccgagtcggtgccattaaagaaaatatcatctttggtgtttcctatgatgaatatacgcggttctatctagttacgcgttaaaccaactagaa

SEQ ID NO: 1569 - RNA, 180 nt, synthetic construct
  source 1..180: mol_type = other RNA
gtctgtatctatattcatcatgtttaagagcggggaaatccgcaagtttaaataaggctagtccgttatcagcgtgaaaacgcggcaccgagtcggtgcccattaaagaaaatatcatctttggtgtttcctatgatgaatatcgcggttctatctagttacgcgttaaaccaactagaa

SEQ ID NO: 1570 - RNA, 180 nt, synthetic construct
  source 1..180: mol_type = other RNA
gcagttttcctggattatgccgtttaagagcggggaaatccgcaagtttaaataaggctagtccgttatcagcgtgaaaacgcggcaccgagtcggtgcccaaagatgatattttctttaatggtgccaggcataatccaggacgcggttctatctagttacgcgttaaaccaactagaa

SEQ ID NO: 1571 - RNA, 180 nt, synthetic construct
  source 1..180: mol_type = other RNA
gcagttttcctggattatgccgtttaagagcggggaaatccgcaagtttaaataaggctagtccgttatcagcgtgaaaacgcggcaccgagtcggtgcaccaaagatgatattttctttaatggtgccaggcataatccaggcgcggttctatctagttacgcgttaaaccaactagaa

SEQ ID NO: 1572 - RNA, 180 nt, synthetic construct
  source 1..180: mol_type = other RNA
gcagttttcctggattatgccgtttaagagcggggaaatccgcaagtttaaataaggctagtccgttatcagcgtgaaaacgcggcaccgagtcggtgccaccaaagatgatattttctttaatggtgccaggcataatccagcgcggttctatctagttacgcgttaaaccaactagaa

SEQ ID NO: 1573 - RNA, 180 nt, synthetic construct
  source 1..180: mol_type = other RNA
gcagttttcctggattatgccgtttaagagcggggaaatccgcaagtttaaataaggctagtccgttatcagcgtgaaaacgcggcaccgagtcggtgcacaccaaagatgatattttctttaatggtgccaggcataatccacgcggttctatctagttacgcgttaaaccaactagaa

SEQ ID NO: 1574 - RNA, 180 nt, synthetic construct
  source 1..180: mol_type = other RNA
gttcatcataggaaacaccaagtttaagagcggggaaatccgcaagtttaaataaggctagtccgttatcagcgtgaaaacgcggcaccgagtcggtgctggcaccattaaagaaaatatcatctttggtgtttcctatgatgcgcggttctatctagttacgcgttaaaccaactagaa

SEQ ID NO: 1575 - RNA, 180 nt, synthetic construct
  source 1..180: mol_type = other RNA
gttcatcataggaaacaccaagtttaagagcggggaaatccgcaagtttaaataaggctagtccgttatcagcgtgaaaacgcggcaccgagtcggtgcctggcaccattaaagaaaatatcatctttggtgtttcctatgatcgcggttctatctagttacgcgttaaaccaactagaa

SEQ ID NO: 1576 - RNA, 180 nt, synthetic construct
  source 1..180: mol_type = other RNA
gttcatcataggaaacaccaagtttaagagcggggaaatccgcaagtttaaataaggctagtccgttatcagcgtgaaaacgcggcaccgagtcggtgccctggcaccattaaagaaaatatcatctttggtgtttcctatgacgcggttctatctagttacgcgttaaaccaactagaa

SEQ ID NO: 1577 - RNA, 180 nt, synthetic construct
  source 1..180: mol_type = other RNA
gttcatcataggaaacaccaagtttaagagcggggaaatccgcaagtttaaataaggctagtccgttatcagcgtgaaaacgcggcaccgagtcggtgcgcctggcaccattaaagaaaatatcatctttggtgtttcctatgcgcggttctatctagttacgcgttaaaccaactagaa

SEQ ID NO: 1578 - RNA, 180 nt, synthetic construct
  source 1..180: mol_type = other RNA
gttcatcataggaaacaccaagtttaagagcggggaaatccgcaagtttaaataaggctagtccgttatcagcgtgaaaacgcggcaccgagtcggtgctgcctggcaccattaaagaaaatatcatctttggtgtttcctatcgcggttctatctagttacgcgttaaaccaactagaa

SEQ ID NO: 1579 - RNA, 180 nt, synthetic construct
  source 1..180: mol_type = other RNA
gttcatcataggaaacaccaagtttaagagcggggaaatccgcaagtttaaataaggctagtccgttatcagcgtgaaaacgcggcaccgagtcggtgcatgcctggcaccattaaagaaaatatcatctttggtgtttcctacgcggttctatctagttacgcgttaaaccaactagaa

SEQ ID NO: 1580 - RNA, 180 nt, synthetic construct
  source 1..180: mol_type = other RNA
gttcatcataggaaacaccaagtttaagagcggggaaatccgcaagtttaaataaggctagtccgttatcagcgtgaaaacgcggcaccgagtcggtgctatgcctggcaccattaaagaaaatatcatctttggtgtttcctcgcggttctatctagttacgcgttaaaccaactagaa

SEQ ID NO: 1581 - RNA, 181 nt, synthetic construct
  source 1..181: mol_type = other RNA
gtctgtatctatattcatcatgtttaagagctagaaatagcaagtttaaataaggctagtccgttatcagcgtgaaaacgcggcaccgagtcggtgcgaaaatatcatctttggtgtttcctatgatgaatatagatacagtttcgcggttctatctagttacgcgttaaaccaactagaa

SEQ ID NO: 1582 - RNA, 181 nt, synthetic construct
  source 1..181: mol_type = other RNA
gcagttttcctggattatgccgtttaagagctagaaatagcaagtttaaataaggctagtccgttatcagcgtgaaaacgcggcaccgagtcggtgcaccaaagatgatattttctttaatggtgccaggcataatccagtaatcgcggttctatctagttacgcgttaaaccaactagaa

SEQ ID NO: 1583 - RNA, 181 nt, synthetic construct
  source 1..181: mol_type = other RNA
gtctgtatctatattcatcatgtttaagagcggggaaatccgcaagtttaaataaggctagtccgttatcagcgtgaaaacgcggcaccgagtcggtgcaagaaaatatcatctttggtgtttcctatgatgaatatagatacacgcggttctatctagttacgcgttaaaccaactagaa

SEQ ID NO: 1584 - RNA, 181 nt, synthetic construct
  source 1..181: mol_type = other RNA
gtctgtatctatattcatcatgtttaagagcggggaaatccgcaagtttaaataaggctagtccgttatcagcgtgaaaacgcggcaccgagtcggtgcaaagaaaatatcatctttggtgtttcctatgatgaatatagataccgcggttctatctagttacgcgttaaaccaactagaa

SEQ ID NO: 1585 - RNA, 181 nt, synthetic construct
  source 1..181: mol_type = other RNA
gtctgtatctatattcatcatgtttaagagcggggaaatccgcaagtttaaataaggctagtccgttatcagcgtgaaaacgcggcaccgagtcggtgctaaagaaaatatcatctttggtgtttcctatgatgaatatagatacgcggttctatctagttacgcgttaaaccaactagaa

SEQ ID NO: 1586 - RNA, 181 nt, synthetic construct
  source 1..181: mol_type = other RNA
gtctgtatctatattcatcatgtttaagagcggggaaatccgcaagtttaaataaggctagtccgttatcagcgtgaaaacgcggcaccgagtcggtgcttaaagaaaatatcatctttggtgtttcctatgatgaatatagatcgcggttctatctagttacgcgttaaaccaactagaa

SEQ ID NO: 1587 - RNA, 181 nt, synthetic construct
  source 1..181: mol_type = other RNA
gtctgtatctatattcatcatgtttaagagcggggaaatccgcaagtttaaataaggctagtccgttatcagcgtgaaaacgcggcaccgagtcggtgcattaaagaaaatatcatctttggtgtttcctatgatgaatatagacgcggttctatctagttacgcgttaaaccaactagaa

SEQ ID NO: 1588 - RNA, 181 nt, synthetic construct
  source 1..181: mol_type = other RNA
gtctgtatctatattcatcatgtttaagagcggggaaatccgcaagtttaaataaggctagtccgttatcagcgtgaaaacgcggcaccgagtcggtgccattaaagaaaatatcatctttggtgtttcctatgatgaatatagcgcggttctatctagttacgcgttaaaccaactagaa

SEQ ID NO: 1589 - RNA, 181 nt, synthetic construct
  source 1..181: mol_type = other RNA
gtctgtatctatattcatcatgtttaagagcggggaaatccgcaagtttaaataaggctagtccgttatcagcgtgaaaacgcggcaccgagtcggtgcccattaaagaaaatatcatctttggtgtttcctatgatgaatatacgcggttctatctagttacgcgttaaaccaactagaa

SEQ ID NO: 1590 - RNA, 181 nt, synthetic construct
  source 1..181: mol_type = other RNA
gtctgtatctatattcatcatgtttaagagcggggaaatccgcaagtttaaataaggctagtccgttatcagcgtgaaaacgcggcaccgagtcggtgcaccattaaagaaaatatcatctttggtgtttcctatgatgaatatcgcggttctatctagttacgcgttaaaccaactagaa

SEQ ID NO: 1591 - RNA, 181 nt, synthetic construct
  source 1..181: mol_type = other RNA
gcagttttcctggattatgccgtttaagagcggggaaatccgcaagtttaaataaggctagtccgttatcagcgtgaaaacgcggcaccgagtcggtgcccaaagatgatattttctttaatggtgccaggcataatccaggaacgcggttctatctagttacgcgttaaaccaactagaa

SEQ ID NO: 1592 - RNA, 181 nt, synthetic construct
  source 1..181: mol_type = other RNA
gcagttttcctggattatgccgtttaagagcggggaaatccgcaagtttaaataaggctagtccgttatcagcgtgaaaacgcggcaccgagtcggtgcaccaaagatgatattttctttaatggtgccaggcataatccaggacgcggttctatctagttacgcgttaaaccaactagaa

SEQ ID NO: 1593 - RNA, 181 nt, synthetic construct
  source 1..181: mol_type = other RNA
gcagttttcctggattatgccgtttaagagcggggaaatccgcaagtttaaataaggctagtccgttatcagcgtgaaaacgcggcaccgagtcggtgccaccaaagatgatattttctttaatggtgccaggcataatccaggcgcggttctatctagttacgcgttaaaccaactagaa

SEQ ID NO: 1594 - RNA, 181 nt, synthetic construct
  source 1..181: mol_type = other RNA
gcagttttcctggattatgccgtttaagagcggggaaatccgcaagtttaaataaggctagtccgttatcagcgtgaaaacgcggcaccgagtcggtgcacaccaaagatgatattttctttaatggtgccaggcataatccagcgcggttctatctagttacgcgttaaaccaactagaa

SEQ ID NO: 1595 - RNA, 181 nt, synthetic construct
  source 1..181: mol_type = other RNA
gcagttttcctggattatgccgtttaagagcggggaaatccgcaagtttaaataaggctagtccgttatcagcgtgaaaacgcggcaccgagtcggtgcaacaccaaagatgatattttctttaatggtgccaggcataatccacgcggttctatctagttacgcgttaaaccaactagaa

SEQ ID NO: 1596 - RNA, 181 nt, synthetic construct
  source 1..181: mol_type = other RNA
gttcatcataggaaacaccaagtttaagagcggggaaatccgcaagtttaaataaggctagtccgttatcagcgtgaaaacgcggcaccgagtcggtgcctggcaccattaaagaaaatatcatctttggtgtttcctatgatgcgcggttctatctagttacgcgttaaaccaactagaa

SEQ ID NO: 1597 - RNA, 181 nt, synthetic construct
  source 1..181: mol_type = other RNA
gttcatcataggaaacaccaagtttaagagcggggaaatccgcaagtttaaataaggctagtccgttatcagcgtgaaaacgcggcaccgagtcggtgccctggcaccattaaagaaaatatcatctttggtgtttcctatgatcgcggttctatctagttacgcgttaaaccaactagaa

SEQ ID NO: 1598 - RNA, 181 nt, synthetic construct
  source 1..181: mol_type = other RNA
gttcatcataggaaacaccaagtttaagagcggggaaatccgcaagtttaaataaggctagtccgttatcagcgtgaaaacgcggcaccgagtcggtgcgcctggcaccattaaagaaaatatcatctttggtgtttcctatgacgcggttctatctagttacgcgttaaaccaactagaa

SEQ ID NO: 1599 - RNA, 181 nt, synthetic construct
  source 1..181: mol_type = other RNA
gttcatcataggaaacaccaagtttaagagcggggaaatccgcaagtttaaataaggctagtccgttatcagcgtgaaaacgcggcaccgagtcggtgctgcctggcaccattaaagaaaatatcatctttggtgtttcctatgcgcggttctatctagttacgcgttaaaccaactagaa

SEQ ID NO: 1600 - RNA, 181 nt, synthetic construct
  source 1..181: mol_type = other RNA
gttcatcataggaaacaccaagtttaagagcggggaaatccgcaagtttaaataaggctagtccgttatcagcgtgaaaacgcggcaccgagtcggtgcatgcctggcaccattaaagaaaatatcatctttggtgtttcctatcgcggttctatctagttacgcgttaaaccaactagaa

SEQ ID NO: 1601 - RNA, 181 nt, synthetic construct
  source 1..181: mol_type = other RNA
gttcatcataggaaacaccaagtttaagagcggggaaatccgcaagtttaaataaggctagtccgttatcagcgtgaaaacgcggcaccgagtcggtgctatgcctggcaccattaaagaaaatatcatctttggtgtttcctacgcggttctatctagttacgcgttaaaccaactagaa

SEQ ID NO: 1602 - RNA, 182 nt, synthetic construct
  source 1..182: mol_type = other RNA
gtctgtatctatattcatcatgtttaagagctagaaatagcaagtttaaataaggctagtccgttatcagcgtgaaaacgcggcaccgagtcggtgcattaaagaaaatatcatctttggtgtttcctatgatgaatatagtatccgcggttctatctagttacgcgttaaaccaactagaa

SEQ ID NO: 1603 - RNA, 182 nt, synthetic construct
  source 1..182: mol_type = other RNA
gtctgtatctatattcatcatgtttaagagctagaaatagcaagtttaaataaggctagtccgttatcagcgtgaaaacgcggcaccgagtcggtgcaaagaaaatatcatctttggtgtttcctatgatgaatatagatatatccgcggttctatctagttacgcgttaaaccaactagaa

SEQ ID NO: 1604 - RNA, 182 nt, synthetic construct
  source 1..182: mol_type = other RNA
gcagttttcctggattatgccgtttaagagctagaaatagcaagtttaaataaggctagtccgttatcagcgtgaaaacgcggcaccgagtcggtgcaacaccaaagatgatattttctttaatggtgccaggcataatccatctcgcggttctatctagttacgcgttaaaccaactagaa

SEQ ID NO: 1605 - RNA, 182 nt, synthetic construct
  source 1..182: mol_type = other RNA
gtctgtatctatattcatcatgtttaagagcggggaaatccgcaagtttaaataaggctagtccgttatcagcgtgaaaacgcggcaccgagtcggtgcaaagaaaatatcatctttggtgtttcctatgatgaatatagatacacgcggttctatctagttacgcgttaaaccaactagaa

SEQ ID NO: 1606 - RNA, 182 nt, synthetic construct
  source 1..182: mol_type = other RNA
gtctgtatctatattcatcatgtttaagagcggggaaatccgcaagtttaaataaggctagtccgttatcagcgtgaaaacgcggcaccgagtcggtgctaaagaaaatatcatctttggtgtttcctatgatgaatatagataccgcggttctatctagttacgcgttaaaccaactagaa

SEQ ID NO: 1607 - RNA, 182 nt, synthetic construct
  source 1..182: mol_type = other RNA
gtctgtatctatattcatcatgtttaagagcggggaaatccgcaagtttaaataaggctagtccgttatcagcgtgaaaacgcggcaccgagtcggtgcttaaagaaaatatcatctttggtgtttcctatgatgaatatagatacgcggttctatctagttacgcgttaaaccaactagaa

SEQ ID NO: 1608 - RNA, 182 nt, synthetic construct
  source 1..182: mol_type = other RNA
gtctgtatctatattcatcatgtttaagagcggggaaatccgcaagtttaaataaggctagtccgttatcagcgtgaaaacgcggcaccgagtcggtgcattaaagaaaatatcatctttggtgtttcctatgatgaatatagatcgcggttctatctagttacgcgttaaaccaactagaa

SEQ ID NO: 1609 - RNA, 182 nt, synthetic construct
  source 1..182: mol_type = other RNA
gtctgtatctatattcatcatgtttaagagcggggaaatccgcaagtttaaataaggctagtccgttatcagcgtgaaaacgcggcaccgagtcggtgccattaaagaaaatatcatctttggtgtttcctatgatgaatatagacgcggttctatctagttacgcgttaaaccaactagaa

SEQ ID NO: 1610 - RNA, 182 nt, synthetic construct
  source 1..182: mol_type = other RNA
gtctgtatctatattcatcatgtttaagagcggggaaatccgcaagtttaaataaggctagtccgttatcagcgtgaaaacgcggcaccgagtcggtgcccattaaagaaaatatcatctttggtgtttcctatgatgaatatagcgcggttctatctagttacgcgttaaaccaactagaa

SEQ ID NO: 1611 - RNA, 182 nt, synthetic construct
  source 1..182: mol_type = other RNA
gtctgtatctatattcatcatgtttaagagcggggaaatccgcaagtttaaataaggctagtccgttatcagcgtgaaaacgcggcaccgagtcggtgcaccattaaagaaaatatcatctttggtgtttcctatgatgaatatacgcggttctatctagttacgcgttaaaccaactagaa

SEQ ID NO: 1612 - RNA, 182 nt, synthetic construct
  source 1..182: mol_type = other RNA
gtctgtatctatattcatcatgtttaagagcggggaaatccgcaagtttaaataaggctagtccgttatcagcgtgaaaacgcggcaccgagtcggtgccaccattaaagaaaatatcatctttggtgtttcctatgatgaatatcgcggttctatctagttacgcgttaaaccaactagaa

SEQ ID NO: 1613 - RNA, 182 nt, synthetic construct
  source 1..182: mol_type = other RNA
gcagttttcctggattatgccgtttaagagcggggaaatccgcaagtttaaataaggctagtccgttatcagcgtgaaaacgcggcaccgagtcggtgcccaaagatgatattttctttaatggtgccaggcataatccaggaaacgcggttctatctagttacgcgttaaaccaactagaa

SEQ ID NO: 1614 - RNA, 182 nt, synthetic construct
  source 1..182: mol_type = other RNA
gcagttttcctggattatgccgtttaagagcggggaaatccgcaagtttaaataaggctagtccgttatcagcgtgaaaacgcggcaccgagtcggtgcaccaaagatgatattttctttaatggtgccaggcataatccaggaacgcggttctatctagttacgcgttaaaccaactagaa

SEQ ID NO: 1615 - RNA, 182 nt, synthetic construct
  source 1..182: mol_type = other RNA
gcagttttcctggattatgccgtttaagagcggggaaatccgcaagtttaaataaggctagtccgttatcagcgtgaaaacgcggcaccgagtcggtgccaccaaagatgatattttctttaatggtgccaggcataatccaggacgcggttctatctagttacgcgttaaaccaactagaa

SEQ ID NO: 1616 - RNA, 182 nt, synthetic construct
  source 1..182: mol_type = other RNA
gcagttttcctggattatgccgtttaagagcggggaaatccgcaagtttaaataaggctagtccgttatcagcgtgaaaacgcggcaccgagtcggtgcacaccaaagatgatattttctttaatggtgccaggcataatccaggcgcggttctatctagttacgcgttaaaccaactagaa

SEQ ID NO: 1617 - RNA, 182 nt, synthetic construct
  source 1..182: mol_type = other RNA
gcagttttcctggattatgccgtttaagagcggggaaatccgcaagtttaaataaggctagtccgttatcagcgtgaaaacgcggcaccgagtcggtgcaacaccaaagatgatattttctttaatggtgccaggcataatccagcgcggttctatctagttacgcgttaaaccaactagaa

SEQ ID NO: 1618 - RNA, 182 nt, synthetic construct
  source 1..182: mol_type = other RNA
gcagttttcctggattatgccgtttaagagcggggaaatccgcaagtttaaataaggctagtccgttatcagcgtgaaaacgcggcaccgagtcggtgcaaacaccaaagatgatattttctttaatggtgccaggcataatccacgcggttctatctagttacgcgttaaaccaactagaa

SEQ ID NO: 1619 - RNA, 182 nt, synthetic construct
  source 1..182: mol_type = other RNA
gttcatcataggaaacaccaagtttaagagcggggaaatccgcaagtttaaataaggctagtccgttatcagcgtgaaaacgcggcaccgagtcggtgccctggcaccattaaagaaaatatcatctttggtgtttcctatgatgcgcggttctatctagttacgcgttaaaccaactagaa

SEQ ID NO: 1620 - RNA, 182 nt, synthetic construct
  source 1..182: mol_type = other RNA
gttcatcataggaaacaccaagtttaagagcggggaaatccgcaagtttaaataaggctagtccgttatcagcgtgaaaacgcggcaccgagtcggtgcgcctggcaccattaaagaaaatatcatctttggtgtttcctatgatcgcggttctatctagttacgcgttaaaccaactagaa

SEQ ID NO: 1621 - RNA, 182 nt, synthetic construct
  source 1..182: mol_type = other RNA
gttcatcataggaaacaccaagtttaagagcggggaaatccgcaagtttaaataaggctagtccgttatcagcgtgaaaacgcggcaccgagtcggtgctgcctggcaccattaaagaaaatatcatctttggtgtttcctatgacgcggttctatctagttacgcgttaaaccaactagaa

SEQ ID NO: 1622 - RNA, 182 nt, synthetic construct
  source 1..182: mol_type = other RNA
gttcatcataggaaacaccaagtttaagagcggggaaatccgcaagtttaaataaggctagtccgttatcagcgtgaaaacgcggcaccgagtcggtgcatgcctggcaccattaaagaaaatatcatctttggtgtttcctatgcgcggttctatctagttacgcgttaaaccaactagaa

SEQ ID NO: 1623 - RNA, 182 nt, synthetic construct
  source 1..182: mol_type = other RNA
gttcatcataggaaacaccaagtttaagagcggggaaatccgcaagtttaaataaggctagtccgttatcagcgtgaaaacgcggcaccgagtcggtgctatgcctggcaccattaaagaaaatatcatctttggtgtttcctatcgcggttctatctagttacgcgttaaaccaactagaa

SEQ ID NO: 1624 - RNA, 183 nt, synthetic construct
  source 1..183: mol_type = other RNA
gcagttttcctggattatgccgtttaagagctagaaatagcaagtttaaataaggctagtccgttatcagcgtgaaaacgcggcaccgagtcggtgcaccaaagatgatattttctttaatggtgccaggcataatccaggagactcgcggttctatctagttacgcgttaaaccaactagaa

SEQ ID NO: 1625 - RNA, 183 nt, synthetic construct
  source 1..183: mol_type = other RNA
gtctgtatctatattcatcatgtttaagagcggggaaatccgcaagtttaaataaggctagtccgttatcagcgtgaaaacgcggcaccgagtcggtgctaaagaaaatatcatctttggtgtttcctatgatgaatatagatacacgcggttctatctagttacgcgttaaaccaactagaa

SEQ ID NO: 1626 - RNA, 183 nt, synthetic construct
  source 1..183: mol_type = other RNA
gtctgtatctatattcatcatgtttaagagcggggaaatccgcaagtttaaataaggctagtccgttatcagcgtgaaaacgcggcaccgagtcggtgcttaaagaaaatatcatctttggtgtttcctatgatgaatatagataccgcggttctatctagttacgcgttaaaccaactagaa

SEQ ID NO: 1627 - RNA, 183 nt, synthetic construct
  source 1..183: mol_type = other RNA
gtctgtatctatattcatcatgtttaagagcggggaaatccgcaagtttaaataaggctagtccgttatcagcgtgaaaacgcggcaccgagtcggtgcattaaagaaaatatcatctttggtgtttcctatgatgaatatagatacgcggttctatctagttacgcgttaaaccaactagaa

SEQ ID NO: 1628 - RNA, 183 nt, synthetic construct
  source 1..183: mol_type = other RNA
gtctgtatctatattcatcatgtttaagagcggggaaatccgcaagtttaaataaggctagtccgttatcagcgtgaaaacgcggcaccgagtcggtgccattaaagaaaatatcatctttggtgtttcctatgatgaatatagatcgcggttctatctagttacgcgttaaaccaactagaa

SEQ ID NO: 1629 - RNA, 183 nt, synthetic construct
  source 1..183: mol_type = other RNA
gtctgtatctatattcatcatgtttaagagcggggaaatccgcaagtttaaataaggctagtccgttatcagcgtgaaaacgcggcaccgagtcggtgcccattaaagaaaatatcatctttggtgtttcctatgatgaatatagacgcggttctatctagttacgcgttaaaccaactagaa

SEQ ID NO: 1630 - RNA, 183 nt, synthetic construct
  source 1..183: mol_type = other RNA
gtctgtatctatattcatcatgtttaagagcggggaaatccgcaagtttaaataaggctagtccgttatcagcgtgaaaacgcggcaccgagtcggtgcaccattaaagaaaatatcatctttggtgtttcctatgatgaatatagcgcggttctatctagttacgcgttaaaccaactagaa

SEQ ID NO: 1631 - RNA, 183 nt, synthetic construct
  source 1..183: mol_type = other RNA
gtctgtatctatattcatcatgtttaagagcggggaaatccgcaagtttaaataaggctagtccgttatcagcgtgaaaacgcggcaccgagtcggtgccaccattaaagaaaatatcatctttggtgtttcctatgatgaatatacgcggttctatctagttacgcgttaaaccaactagaa

SEQ ID NO: 1632 - RNA, 183 nt, synthetic construct
  source 1..183: mol_type = other RNA
gtctgtatctatattcatcatgtttaagagcggggaaatccgcaagtttaaataaggctagtccgttatcagcgtgaaaacgcggcaccgagtcggtgcgcaccattaaagaaaatatcatctttggtgtttcctatgatgaatatcgcggttctatctagttacgcgttaaaccaactagaa

SEQ ID NO: 1633 - RNA, 183 nt, synthetic construct
  source 1..183: mol_type = other RNA
gcagttttcctggattatgccgtttaagagcggggaaatccgcaagtttaaataaggctagtccgttatcagcgtgaaaacgcggcaccgagtcggtgcccaaagatgatattttctttaatggtgccaggcataatccaggaaaacgcggttctatctagttacgcgttaaaccaactagaa

SEQ ID NO: 1634 - RNA, 183 nt, synthetic construct
  source 1..183: mol_type = other RNA
gcagttttcctggattatgccgtttaagagcggggaaatccgcaagtttaaataaggctagtccgttatcagcgtgaaaacgcggcaccgagtcggtgcaccaaagatgatattttctttaatggtgccaggcataatccaggaaacgcggttctatctagttacgcgttaaaccaactagaa

SEQ ID NO: 1635 - RNA, 183 nt, synthetic construct
  source 1..183: mol_type = other RNA
gcagttttcctggattatgccgtttaagagcggggaaatccgcaagtttaaataaggctagtccgttatcagcgtgaaaacgcggcaccgagtcggtgccaccaaagatgatattttctttaatggtgccaggcataatccaggaacgcggttctatctagttacgcgttaaaccaactagaa

SEQ ID NO: 1636 - RNA, 183 nt, synthetic construct
  source 1..183: mol_type = other RNA
gcagttttcctggattatgccgtttaagagcggggaaatccgcaagtttaaataaggctagtccgttatcagcgtgaaaacgcggcaccgagtcggtgcacaccaaagatgatattttctttaatggtgccaggcataatccaggacgcggttctatctagttacgcgttaaaccaactagaa

SEQ ID NO: 1637 - RNA, 183 nt, synthetic construct
  source 1..183: mol_type = other RNA
gcagttttcctggattatgccgtttaagagcggggaaatccgcaagtttaaataaggctagtccgttatcagcgtgaaaacgcggcaccgagtcggtgcaacaccaaagatgatattttctttaatggtgccaggcataatccaggcgcggttctatctagttacgcgttaaaccaactagaa

SEQ ID NO: 1638 - RNA, 183 nt, synthetic construct
  source 1..183: mol_type = other RNA
gcagttttcctggattatgccgtttaagagcggggaaatccgcaagtttaaataaggctagtccgttatcagcgtgaaaacgcggcaccgagtcggtgcaaacaccaaagatgatattttctttaatggtgccaggcataatccagcgcggttctatctagttacgcgttaaaccaactagaa

SEQ ID NO: 1639 - RNA, 183 nt, synthetic construct
  source 1..183: mol_type = other RNA
gcagttttcctggattatgccgtttaagagcggggaaatccgcaagtttaaataaggctagtccgttatcagcgtgaaaacgcggcaccgagtcggtgcgaaacaccaaagatgatattttctttaatggtgccaggcataatccacgcggttctatctagttacgcgttaaaccaactagaa

SEQ ID NO: 1640 - RNA, 183 nt, synthetic construct
  source 1..183: mol_type = other RNA
gttcatcataggaaacaccaagtttaagagcggggaaatccgcaagtttaaataaggctagtccgttatcagcgtgaaaacgcggcaccgagtcggtgcgcctggcaccattaaagaaaatatcatctttggtgtttcctatgatgcgcggttctatctagttacgcgttaaaccaactagaa

SEQ ID NO: 1641 - RNA, 183 nt, synthetic construct
  source 1..183: mol_type = other RNA
gttcatcataggaaacaccaagtttaagagcggggaaatccgcaagtttaaataaggctagtccgttatcagcgtgaaaacgcggcaccgagtcggtgctgcctggcaccattaaagaaaatatcatctttggtgtttcctatgatcgcggttctatctagttacgcgttaaaccaactagaa

SEQ ID NO: 1642 - RNA, 183 nt, synthetic construct
  source 1..183: mol_type = other RNA
gttcatcataggaaacaccaagtttaagagcggggaaatccgcaagtttaaataaggctagtccgttatcagcgtgaaaacgcggcaccgagtcggtgcatgcctggcaccattaaagaaaatatcatctttggtgtttcctatgacgcggttctatctagttacgcgttaaaccaactagaa

SEQ ID NO: 1643 - RNA, 183 nt, synthetic construct
  source 1..183: mol_type = other RNA
gttcatcataggaaacaccaagtttaagagcggggaaatccgcaagtttaaataaggctagtccgttatcagcgtgaaaacgcggcaccgagtcggtgctatgcctggcaccattaaagaaaatatcatctttggtgtttcctatgcgcggttctatctagttacgcgttaaaccaactagaa

SEQ ID NO: 1644 - RNA, 184 nt, synthetic construct
  source 1..184: mol_type = other RNA
gtctgtatctatattcatcatgtttaagagctagaaatagcaagtttaaataaggctagtccgttatcagcgtgaaaacgcggcaccgagtcggtgcaaagaaaatatcatctttggtgtttcctatgatgaatatagatacaattgcgcggttctatctagttacgcgttaaaccaactagaa

SEQ ID NO: 1645 - RNA, 184 nt, synthetic construct
  source 1..184: mol_type = other RNA
gcagttttcctggattatgccgtttaagagctagaaatagcaagtttaaataaggctagtccgttatcagcgtgaaaacgcggcaccgagtcggtgcaacaccaaagatgatattttctttaatggtgccaggcataatccagatctcgcggttctatctagttacgcgttaaaccaactagaa

SEQ ID NO: 1646 - RNA, 184 nt, synthetic construct
  source 1..184: mol_type = other RNA
gtctgtatctatattcatcatgtttaagagcggggaaatccgcaagtttaaataaggctagtccgttatcagcgtgaaaacgcggcaccgagtcggtgcttaaagaaaatatcatctttggtgtttcctatgatgaatatagatacacgcggttctatctagttacgcgttaaaccaactagaa

SEQ ID NO: 1647 - RNA, 184 nt, synthetic construct
  source 1..184: mol_type = other RNA
gtctgtatctatattcatcatgtttaagagcggggaaatccgcaagtttaaataaggctagtccgttatcagcgtgaaaacgcggcaccgagtcggtgcattaaagaaaatatcatctttggtgtttcctatgatgaatatagataccgcggttctatctagttacgcgttaaaccaactagaa

SEQ ID NO: 1648 - RNA, 184 nt, synthetic construct
  source 1..184: mol_type = other RNA
gtctgtatctatattcatcatgtttaagagcggggaaatccgcaagtttaaataaggctagtccgttatcagcgtgaaaacgcggcaccgagtcggtgccattaaagaaaatatcatctttggtgtttcctatgatgaatatagatacgcggttctatctagttacgcgttaaaccaactagaa

SEQ ID NO: 1649 - RNA, 184 nt, synthetic construct
  source 1..184: mol_type = other RNA
gtctgtatctatattcatcatgtttaagagcggggaaatccgcaagtttaaataaggctagtccgttatcagcgtgaaaacgcggcaccgagtcggtgcccattaaagaaaatatcatctttggtgtttcctatgatgaatatagatcgcggttctatctagttacgcgttaaaccaactagaa

SEQ ID NO: 1650 - RNA, 184 nt, synthetic construct
  source 1..184: mol_type = other RNA
gtctgtatctatattcatcatgtttaagagcggggaaatccgcaagtttaaataaggctagtccgttatcagcgtgaaaacgcggcaccgagtcggtgcaccattaaagaaaatatcatctttggtgtttcctatgatgaatatagacgcggttctatctagttacgcgttaaaccaactagaa

SEQ ID NO: 1651 - RNA, 184 nt, synthetic construct
  source 1..184: mol_type = other RNA
gtctgtatctatattcatcatgtttaagagcggggaaatccgcaagtttaaataaggctagtccgttatcagcgtgaaaacgcggcaccgagtcggtgccaccattaaagaaaatatcatctttggtgtttcctatgatgaatatagcgcggttctatctagttacgcgttaaaccaactagaa

SEQ ID NO: 1652 - RNA, 184 nt, synthetic construct
  source 1..184: mol_type = other RNA
gtctgtatctatattcatcatgtttaagagcggggaaatccgcaagtttaaataaggctagtccgttatcagcgtgaaaacgcggcaccgagtcggtgcgcaccattaaagaaaatatcatctttggtgtttcctatgatgaatatacgcggttctatctagttacgcgttaaaccaactagaa

SEQ ID NO: 1653 - RNA, 184 nt, synthetic construct
  source 1..184: mol_type = other RNA
gtctgtatctatattcatcatgtttaagagcggggaaatccgcaagtttaaataaggctagtccgttatcagcgtgaaaacgcggcaccgagtcggtgcggcaccattaaagaaaatatcatctttggtgtttcctatgatgaatatcgcggttctatctagttacgcgttaaaccaactagaa

SEQ ID NO: 1654 - RNA, 184 nt, synthetic construct
  source 1..184: mol_type = other RNA
gcagttttcctggattatgccgtttaagagcggggaaatccgcaagtttaaataaggctagtccgttatcagcgtgaaaacgcggcaccgagtcggtgcccaaagatgatattttctttaatggtgccaggcataatccaggaaaaccgcggttctatctagttacgcgttaaaccaactagaa

SEQ ID NO: 1655 - RNA, 184 nt, synthetic construct
  source 1..184: mol_type = other RNA
gcagttttcctggattatgccgtttaagagcggggaaatccgcaagtttaaataaggctagtccgttatcagcgtgaaaacgcggcaccgagtcggtgcaccaaagatgatattttctttaatggtgccaggcataatccaggaaaacgcggttctatctagttacgcgttaaaccaactagaa

SEQ ID NO: 1656 - RNA, 184 nt, synthetic construct
  source 1..184: mol_type = other RNA
gcagttttcctggattatgccgtttaagagcggggaaatccgcaagtttaaataaggctagtccgttatcagcgtgaaaacgcggcaccgagtcggtgccaccaaagatgatattttctttaatggtgccaggcataatccaggaaacgcggttctatctagttacgcgttaaaccaactagaa

SEQ ID NO: 1657 - RNA, 184 nt, synthetic construct
  source 1..184: mol_type = other RNA
gcagttttcctggattatgccgtttaagagcggggaaatccgcaagtttaaataaggctagtccgttatcagcgtgaaaacgcggcaccgagtcggtgcacaccaaagatgatattttctttaatggtgccaggcataatccaggaacgcggttctatctagttacgcgttaaaccaactagaa

SEQ ID NO: 1658 - RNA, 184 nt, synthetic construct
  source 1..184: mol_type = other RNA
gcagttttcctggattatgccgtttaagagcggggaaatccgcaagtttaaataaggctagtccgttatcagcgtgaaaacgcggcaccgagtcggtgcaacaccaaagatgatattttctttaatggtgccaggcataatccaggacgcggttctatctagttacgcgttaaaccaactagaa

SEQ ID NO: 1659 - RNA, 184 nt, synthetic construct
  source 1..184: mol_type = other RNA
gcagttttcctggattatgccgtttaagagcggggaaatccgcaagtttaaataaggctagtccgttatcagcgtgaaaacgcggcaccgagtcggtgcaaacaccaaagatgatattttctttaatggtgccaggcataatccaggcgcggttctatctagttacgcgttaaaccaactagaa

SEQ ID NO: 1660 - RNA, 184 nt, synthetic construct
  source 1..184: mol_type = other RNA
gcagttttcctggattatgccgtttaagagcggggaaatccgcaagtttaaataaggctagtccgttatcagcgtgaaaacgcggcaccgagtcggtgcgaaacaccaaagatgatattttctttaatggtgccaggcataatccagcgcggttctatctagttacgcgttaaaccaactagaa

SEQ ID NO: 1661 - RNA, 184 nt, synthetic construct
  source 1..184: mol_type = other RNA
gcagttttcctggattatgccgtttaagagcggggaaatccgcaagtttaaataaggctagtccgttatcagcgtgaaaacgcggcaccgagtcggtgcggaaacaccaaagatgatattttctttaatggtgccaggcataatccacgcggttctatctagttacgcgttaaaccaactagaa

SEQ ID NO: 1662 - RNA, 184 nt, synthetic construct
  source 1..184: mol_type = other RNA
gttcatcataggaaacaccaagtttaagagcggggaaatccgcaagtttaaataaggctagtccgttatcagcgtgaaaacgcggcaccgagtcggtgctgcctggcaccattaaagaaaatatcatctttggtgtttcctatgatgcgcggttctatctagttacgcgttaaaccaactagaa

SEQ ID NO: 1663 - RNA, 184 nt, synthetic construct
  source 1..184: mol_type = other RNA
gttcatcataggaaacaccaagtttaagagcggggaaatccgcaagtttaaataaggctagtccgttatcagcgtgaaaacgcggcaccgagtcggtgcatgcctggcaccattaaagaaaatatcatctttggtgtttcctatgatcgcggttctatctagttacgcgttaaaccaactagaa

SEQ ID NO: 1664 - RNA, 184 nt, synthetic construct
  source 1..184: mol_type = other RNA
gttcatcataggaaacaccaagtttaagagcggggaaatccgcaagtttaaataaggctagtccgttatcagcgtgaaaacgcggcaccgagtcggtgctatgcctggcaccattaaagaaaatatcatctttggtgtttcctatgacgcggttctatctagttacgcgttaaaccaactagaa

SEQ ID NO: 1665 - RNA, 185 nt, synthetic construct
  source 1..185: mol_type = other RNA
gtctgtatctatattcatcatgtttaagagctagaaatagcaagtttaaataaggctagtccgttatcagcgtgaaaacgcggcaccgagtcggtgcattaaagaaaatatcatctttggtgtttcctatgatgaatatagataaatccgcggttctatctagttacgcgttaaaccaactagaa

SEQ ID NO: 1666 - RNA, 185 nt, synthetic construct
  source 1..185: mol_type = other RNA
gcagttttcctggattatgccgtttaagagctagaaatagcaagtttaaataaggctagtccgttatcagcgtgaaaacgcggcaccgagtcggtgcaccaaagatgatattttctttaatggtgccaggcataatccaggaaacactcgcggttctatctagttacgcgttaaaccaactagaa

SEQ ID NO: 1667 - RNA, 185 nt, synthetic construct
  source 1..185: mol_type = other RNA
gcagttttcctggattatgccgtttaagagctagaaatagcaagtttaaataaggctagtccgttatcagcgtgaaaacgcggcaccgagtcggtgcggaaacaccaaagatgatattttctttaatggtgccaggcataatccatctcgcggttctatctagttacgcgttaaaccaactagaa

SEQ ID NO: 1668 - RNA, 185 nt, synthetic construct
  source 1..185: mol_type = other RNA
gtctgtatctatattcatcatgtttaagagcggggaaatccgcaagtttaaataaggctagtccgttatcagcgtgaaaacgcggcaccgagtcggtgcattaaagaaaatatcatctttggtgtttcctatgatgaatatagatacacgcggttctatctagttacgcgttaaaccaactagaa

SEQ ID NO: 1669 - RNA, 185 nt, synthetic construct
  source 1..185: mol_type = other RNA
gtctgtatctatattcatcatgtttaagagcggggaaatccgcaagtttaaataaggctagtccgttatcagcgtgaaaacgcggcaccgagtcggtgccattaaagaaaatatcatctttggtgtttcctatgatgaatatagataccgcggttctatctagttacgcgttaaaccaactagaa

SEQ ID NO: 1670 - RNA, 185 nt, synthetic construct
  source 1..185: mol_type = other RNA
gtctgtatctatattcatcatgtttaagagcggggaaatccgcaagtttaaataaggctagtccgttatcagcgtgaaaacgcggcaccgagtcggtgcccattaaagaaaatatcatctttggtgtttcctatgatgaatatagatacgcggttctatctagttacgcgttaaaccaactagaa

SEQ ID NO: 1671 - RNA, 185 nt, synthetic construct
  source 1..185: mol_type = other RNA
gtctgtatctatattcatcatgtttaagagcggggaaatccgcaagtttaaataaggctagtccgttatcagcgtgaaaacgcggcaccgagtcggtgcaccattaaagaaaatatcatctttggtgtttcctatgatgaatatagatcgcggttctatctagttacgcgttaaaccaactagaa

SEQ ID NO: 1672 - RNA, 185 nt, synthetic construct
  source 1..185: mol_type = other RNA
gtctgtatctatattcatcatgtttaagagcggggaaatccgcaagtttaaataaggctagtccgttatcagcgtgaaaacgcggcaccgagtcggtgccaccattaaagaaaatatcatctttggtgtttcctatgatgaatatagacgcggttctatctagttacgcgttaaaccaactagaa

SEQ ID NO: 1673 - RNA, 185 nt, synthetic construct
  source 1..185: mol_type = other RNA
gtctgtatctatattcatcatgtttaagagcggggaaatccgcaagtttaaataaggctagtccgttatcagcgtgaaaacgcggcaccgagtcggtgcgcaccattaaagaaaatatcatctttggtgtttcctatgatgaatatagcgcggttctatctagttacgcgttaaaccaactagaa

SEQ ID NO: 1674 - RNA, 185 nt, synthetic construct
  source 1..185: mol_type = other RNA
gtctgtatctatattcatcatgtttaagagcggggaaatccgcaagtttaaataaggctagtccgttatcagcgtgaaaacgcggcaccgagtcggtgcggcaccattaaagaaaatatcatctttggtgtttcctatgatgaatatacgcggttctatctagttacgcgttaaaccaactagaa

SEQ ID NO: 1675 - RNA, 185 nt, synthetic construct
  source 1..185: mol_type = other RNA
gtctgtatctatattcatcatgtttaagagcggggaaatccgcaagtttaaataaggctagtccgttatcagcgtgaaaacgcggcaccgagtcggtgctggcaccattaaagaaaatatcatctttggtgtttcctatgatgaatatcgcggttctatctagttacgcgttaaaccaactagaa

SEQ ID NO: 1676 - RNA, 185 nt, synthetic construct
  source 1..185: mol_type = other RNA
gcagttttcctggattatgccgtttaagagcggggaaatccgcaagtttaaataaggctagtccgttatcagcgtgaaaacgcggcaccgagtcggtgcaccaaagatgatattttctttaatggtgccaggcataatccaggaaaaccgcggttctatctagttacgcgttaaaccaactagaa

SEQ ID NO: 1677 - RNA, 185 nt, synthetic construct
  source 1..185: mol_type = other RNA
gcagttttcctggattatgccgtttaagagcggggaaatccgcaagtttaaataaggctagtccgttatcagcgtgaaaacgcggcaccgagtcggtgccaccaaagatgatattttctttaatggtgccaggcataatccaggaaaacgcggttctatctagttacgcgttaaaccaactagaa

SEQ ID NO: 1678 - RNA, 185 nt, synthetic construct
  source 1..185: mol_type = other RNA
gcagttttcctggattatgccgtttaagagcggggaaatccgcaagtttaaataaggctagtccgttatcagcgtgaaaacgcggcaccgagtcggtgcacaccaaagatgatattttctttaatggtgccaggcataatccaggaaacgcggttctatctagttacgcgttaaaccaactagaa

SEQ ID NO: 1679 - RNA, 185 nt, synthetic construct
  source 1..185: mol_type = other RNA
gcagttttcctggattatgccgtttaagagcggggaaatccgcaagtttaaataaggctagtccgttatcagcgtgaaaacgcggcaccgagtcggtgcaacaccaaagatgatattttctttaatggtgccaggcataatccaggaacgcggttctatctagttacgcgttaaaccaactagaa

SEQ ID NO: 1680 - RNA, 185 nt, synthetic construct
  source 1..185: mol_type = other RNA
gcagttttcctggattatgccgtttaagagcggggaaatccgcaagtttaaataaggctagtccgttatcagcgtgaaaacgcggcaccgagtcggtgcaaacaccaaagatgatattttctttaatggtgccaggcataatccaggacgcggttctatctagttacgcgttaaaccaactagaa

SEQ ID NO: 1681 - RNA, 185 nt, synthetic construct
  source 1..185: mol_type = other RNA
gcagttttcctggattatgccgtttaagagcggggaaatccgcaagtttaaataaggctagtccgttatcagcgtgaaaacgcggcaccgagtcggtgcgaaacaccaaagatgatattttctttaatggtgccaggcataatccaggcgcggttctatctagttacgcgttaaaccaactagaa

SEQ ID NO: 1682 - RNA, 185 nt, synthetic construct
  source 1..185: mol_type = other RNA
gcagttttcctggattatgccgtttaagagcggggaaatccgcaagtttaaataaggctagtccgttatcagcgtgaaaacgcggcaccgagtcggtgcggaaacaccaaagatgatattttctttaatggtgccaggcataatccagcgcggttctatctagttacgcgttaaaccaactagaa

SEQ ID NO: 1683 - RNA, 185 nt, synthetic construct
  source 1..185: mol_type = other RNA
gcagttttcctggattatgccgtttaagagcggggaaatccgcaagtttaaataaggctagtccgttatcagcgtgaaaacgcggcaccgagtcggtgcaggaaacaccaaagatgatattttctttaatggtgccaggcataatccacgcggttctatctagttacgcgttaaaccaactagaa

SEQ ID NO: 1684 - RNA, 185 nt, synthetic construct
  source 1..185: mol_type = other RNA
gttcatcataggaaacaccaagtttaagagcggggaaatccgcaagtttaaataaggctagtccgttatcagcgtgaaaacgcggcaccgagtcggtgcatgcctggcaccattaaagaaaatatcatctttggtgtttcctatgatgcgcggttctatctagttacgcgttaaaccaactagaa

SEQ ID NO: 1685 - RNA, 185 nt, synthetic construct
  source 1..185: mol_type = other RNA
gttcatcataggaaacaccaagtttaagagcggggaaatccgcaagtttaaataaggctagtccgttatcagcgtgaaaacgcggcaccgagtcggtgctatgcctggcaccattaaagaaaatatcatctttggtgtttcctatgatcgcggttctatctagttacgcgttaaaccaactagaa

SEQ ID NO: 1686 - RNA, 186 nt, synthetic construct
  source 1..186: mol_type = other RNA
gcagttttcctggattatgccgtttaagagctagaaatagcaagtttaaataaggctagtccgttatcagcgtgaaaacgcggcaccgagtcggtgcaacaccaaagatgatattttctttaatggtgccaggcataatccaggatgttcgcggttctatctagttacgcgttaaaccaactagaa

SEQ ID NO: 1687 - RNA, 186 nt, synthetic construct
  source 1..186: mol_type = other RNA
gtctgtatctatattcatcatgtttaagagcggggaaatccgcaagtttaaataaggctagtccgttatcagcgtgaaaacgcggcaccgagtcggtgcattaaagaaaacatcatctttggtgtttcatatgatgaatatagatgtcccgcggttctatctagttacgcgttaaaccaactagaa

SEQ ID NO: 1688 - RNA, 186 nt, synthetic construct
  source 1..186: mol_type = other RNA
gtctgtatctatattcatcatgtttaagagcggggaaatccgcaagtttaaataaggctagtccgttatcagcgtgaaaacgcggcaccgagtcggtgcattaaagaaaacatcatctttggtgtttcgtatgatgaatatagatttcccgcggttctatctagttacgcgttaaaccaactagaa

SEQ ID NO: 1689 - RNA, 186 nt, synthetic construct
  source 1..186: mol_type = other RNA
gtctgtatctatattcatcatgtttaagagcggggaaatccgcaagtttaaataaggctagtccgttatcagcgtgaaaacgcggcaccgagtcggtgcataaaagaaaatatcatatttggtgtttcctatgatgaatatagatttcccgcggttctatctagttacgcgttaaaccaactagaa

SEQ ID NO: 1690 - RNA, 186 nt, synthetic construct
  source 1..186: mol_type = other RNA
gtctgtatctatattcatcatgtttaagagcggggaaatccgcaagtttaaataaggctagtccgttatcagcgtgaaaacgcggcaccgagtcggtgcataaaagaaaatatcatctttggtgtttcctatgatgaatatagatgtcccgcggttctatctagttacgcgttaaaccaactagaa

SEQ ID NO: 1691 - RNA, 186 nt, synthetic construct
  source 1..186: mol_type = other RNA
gtctgtatctatattcatcatgtttaagagcggggaaatccgcaagtttaaataaggctagtccgttatcagcgtgaaaacgcggcaccgagtcggtgcatcaaagaaaatatcatatttggtgtttcctatgatgaatatagatgtcccgcggttctatctagttacgcgttaaaccaactagaa

SEQ ID NO: 1692 - RNA, 186 nt, synthetic construct
  source 1..186: mol_type = other RNA
gtctgtatctatattcatcatgtttaagagcggggaaatccgcaagtttaaataaggctagtccgttatcagcgtgaaaacgcggcaccgagtcggtgcatcaaagaaaatatcatctttggtgtttcctatgatgaatatagatgtcccgcggttctatctagttacgcgttaaaccaactagaa

SEQ ID NO: 1693 - RNA, 186 nt, synthetic construct
  source 1..186: mol_type = other RNA
gtctgtatctatattcatcatgtttaagagcggggaaatccgcaagtttaaataaggctagtccgttatcagcgtgaaaacgcggcaccgagtcggtgcattaaagaaaacatcatatttggtgtttcctatgatgaatatagatgatccgcggttctatctagttacgcgttaaaccaactagaa

SEQ ID NO: 1694 - RNA, 186 nt, synthetic construct
  source 1..186: mol_type = other RNA
gtctgtatctatattcatcatgtttaagagcggggaaatccgcaagtttaaataaggctagtccgttatcagcgtgaaaacgcggcaccgagtcggtgcattaaagaaaacatcatctttggtgtttcctatgatgaatatagatgatccgcggttctatctagttacgcgttaaaccaactagaa

SEQ ID NO: 1695 - RNA, 186 nt, synthetic construct
  source 1..186: mol_type = other RNA
gtctgtatctatattcatcatgtttaagagcggggaaatccgcaagtttaaataaggctagtccgttatcagcgtgaaaacgcggcaccgagtcggtgcattaaagaaaatataatatttggtgtttcctatgatgaatatagatctcccgcggttctatctagttacgcgttaaaccaactagaa

SEQ ID NO: 1696 - RNA, 186 nt, synthetic construct
  source 1..186: mol_type = other RNA
gtctgtatctatattcatcatgtttaagagcggggaaatccgcaagtttaaataaggctagtccgttatcagcgtgaaaacgcggcaccgagtcggtgcattaaagaaaatataatctttggtgtttcctatgatgaatatagatctcccgcggttctatctagttacgcgttaaaccaactagaa

SEQ ID NO: 1697 - RNA, 186 nt, synthetic construct
  source 1..186: mol_type = other RNA
gtctgtatctatattcatcatgtttaagagcggggaaatccgcaagtttaaataaggctagtccgttatcagcgtgaaaacgcggcaccgagtcggtgcattaaagaaaatatcatattcggtgtttcctatgatgaatatagattgtccgcggttctatctagttacgcgttaaaccaactagaa

SEQ ID NO: 1698 - RNA, 186 nt, synthetic construct
  source 1..186: mol_type = other RNA
gtctgtatctatattcatcatgtttaagagcggggaaatccgcaagtttaaataaggctagtccgttatcagcgtgaaaacgcggcaccgagtcggtgcattaaagaaaatatcatatttggagtttcctatgatgaatatagattatccgcggttctatctagttacgcgttaaaccaactagaa

SEQ ID NO: 1699 - RNA, 186 nt, synthetic construct
  source 1..186: mol_type = other RNA
gtctgtatctatattcatcatgtttaagagcggggaaatccgcaagtttaaataaggctagtccgttatcagcgtgaaaacgcggcaccgagtcggtgcattaaagaaaatatcatatttggcgtttcctatgatgaatatagatcacccgcggttctatctagttacgcgttaaaccaactagaa

SEQ ID NO: 1700 - RNA, 186 nt, synthetic construct
  source 1..186: mol_type = other RNA
gtctgtatctatattcatcatgtttaagagcggggaaatccgcaagtttaaataaggctagtccgttatcagcgtgaaaacgcggcaccgagtcggtgcattaaagaaaatatcatatttggggtttcctatgatgaatatagattatccgcggttctatctagttacgcgttaaaccaactagaa

SEQ ID NO: 1701 - RNA, 186 nt, synthetic construct
  source 1..186: mol_type = other RNA
gtctgtatctatattcatcatgtttaagagcggggaaatccgcaagtttaaataaggctagtccgttatcagcgtgaaaacgcggcaccgagtcggtgcattaaagaaaatatcatatttggtgtatcctatgatgaatatagatgtatcgcggttctatctagttacgcgttaaaccaactagaa

SEQ ID NO: 1702 - RNA, 186 nt, synthetic construct
  source 1..186: mol_type = other RNA
gtctgtatctatattcatcatgtttaagagcggggaaatccgcaagtttaaataaggctagtccgttatcagcgtgaaaacgcggcaccgagtcggtgcattaaagaaaatatcatatttggtgtctcctatgatgaatatagattgctcgcggttctatctagttacgcgttaaaccaactagaa

SEQ ID NO: 1703 - RNA, 186 nt, synthetic construct
  source 1..186: mol_type = other RNA
gtctgtatctatattcatcatgtttaagagcggggaaatccgcaagtttaaataaggctagtccgttatcagcgtgaaaacgcggcaccgagtcggtgcattaaagaaaatatcatatttggtgtgtcctatgatgaatatagattgtacgcggttctatctagttacgcgttaaaccaactagaa

SEQ ID NO: 1704 - RNA, 186 nt, synthetic construct
  source 1..186: mol_type = other RNA
gtctgtatctatattcatcatgtttaagagcggggaaatccgcaagtttaaataaggctagtccgttatcagcgtgaaaacgcggcaccgagtcggtgcattaaagaaaatatcatatttggtgtttcatatgatgaatatagattgtccgcggttctatctagttacgcgttaaaccaactagaa

SEQ ID NO: 1705 - RNA, 186 nt, synthetic construct
  source 1..186: mol_type = other RNA
gtctgtatctatattcatcatgtttaagagcggggaaatccgcaagtttaaataaggctagtccgttatcagcgtgaaaacgcggcaccgagtcggtgcattaaagaaaatatcatatttggtgtttcctacgatgaatatagatttcccgcggttctatctagttacgcgttaaaccaactagaa

SEQ ID NO: 1706 - RNA, 186 nt, synthetic construct
  source 1..186: mol_type = other RNA
gtctgtatctatattcatcatgtttaagagcggggaaatccgcaagtttaaataaggctagtccgttatcagcgtgaaaacgcggcaccgagtcggtgcattaaagaaaatatcatatttggtgtttcctatgatgaatatagatttcccgcggttctatctagttacgcgttaaaccaactagaa

SEQ ID NO: 1707 - RNA, 186 nt, synthetic construct
  source 1..186: mol_type = other RNA
gtctgtatctatattcatcatgtttaagagcggggaaatccgcaagtttaaataaggctagtccgttatcagcgtgaaaacgcggcaccgagtcggtgcattaaagaaaatatcatatttggtgtttcgtatgatgaatatagatgtgtcgcggttctatctagttacgcgttaaaccaactagaa

SEQ ID NO: 1708 - RNA, 186 nt, synthetic construct
  source 1..186: mol_type = other RNA
gtctgtatctatattcatcatgtttaagagcggggaaatccgcaagtttaaataaggctagtccgttatcagcgtgaaaacgcggcaccgagtcggtgcattaaagaaaatatcatatttggtgtttcttatgatgaatatagatgatccgcggttctatctagttacgcgttaaaccaactagaa

SEQ ID NO: 1709 - RNA, 186 nt, synthetic construct
  source 1..186: mol_type = other RNA
gtctgtatctatattcatcatgtttaagagcggggaaatccgcaagtttaaataaggctagtccgttatcagcgtgaaaacgcggcaccgagtcggtgcattaaagaaaatatcatcttcggtgtttcctatgatgaatatagattatccgcggttctatctagttacgcgttaaaccaactagaa

SEQ ID NO: 1710 - RNA, 186 nt, synthetic construct
  source 1..186: mol_type = other RNA
gtctgtatctatattcatcatgtttaagagcggggaaatccgcaagtttaaataaggctagtccgttatcagcgtgaaaacgcggcaccgagtcggtgcattaaagaaaatatcatctttggagtttcctatgatgaatatagattattcgcggttctatctagttacgcgttaaaccaactagaa

SEQ ID NO: 1711 - RNA, 186 nt, synthetic construct
  source 1..186: mol_type = other RNA
gtctgtatctatattcatcatgtttaagagcggggaaatccgcaagtttaaataaggctagtccgttatcagcgtgaaaacgcggcaccgagtcggtgcattaaagaaaatatcatctttggcgtttcctatgatgaatatagattacacgcggttctatctagttacgcgttaaaccaactagaa

SEQ ID NO: 1712 - RNA, 186 nt, synthetic construct
  source 1..186: mol_type = other RNA
gtctgtatctatattcatcatgtttaagagcggggaaatccgcaagtttaaataaggctagtccgttatcagcgtgaaaacgcggcaccgagtcggtgcattaaagaaaatatcatctttggggtttcctatgatgaatatagattattcgcggttctatctagttacgcgttaaaccaactagaa

SEQ ID NO: 1713 - RNA, 186 nt, synthetic construct
  source 1..186: mol_type = other RNA
gtctgtatctatattcatcatgtttaagagcggggaaatccgcaagtttaaataaggctagtccgttatcagcgtgaaaacgcggcaccgagtcggtgcattaaagaaaatatcatctttggtgtatcctatgatgaatatagatgttccgcggttctatctagttacgcgttaaaccaactagaa

SEQ ID NO: 1714 - RNA, 186 nt, synthetic construct
  source 1..186: mol_type = other RNA
gtctgtatctatattcatcatgtttaagagcggggaaatccgcaagtttaaataaggctagtccgttatcagcgtgaaaacgcggcaccgagtcggtgcattaaagaaaatatcatctttggtgtctcctatgatgaatatagattactcgcggttctatctagttacgcgttaaaccaactagaa

SEQ ID NO: 1715 - RNA, 186 nt, synthetic construct
  source 1..186: mol_type = other RNA
gtctgtatctatattcatcatgtttaagagcggggaaatccgcaagtttaaataaggctagtccgttatcagcgtgaaaacgcggcaccgagtcggtgcattaaagaaaatatcatctttggtgtgtcctatgatgaatatagatgtaccgcggttctatctagttacgcgttaaaccaactagaa

SEQ ID NO: 1716 - RNA, 186 nt, synthetic construct
  source 1..186: mol_type = other RNA
gtctgtatctatattcatcatgtttaagagcggggaaatccgcaagtttaaataaggctagtccgttatcagcgtgaaaacgcggcaccgagtcggtgcattaaagaaaatatcatctttggtgtttcatatgatgaatatagatttcccgcggttctatctagttacgcgttaaaccaactagaa

SEQ ID NO: 1717 - RNA, 186 nt, synthetic construct
  source 1..186: mol_type = other RNA
gtctgtatctatattcatcatgtttaagagcggggaaatccgcaagtttaaataaggctagtccgttatcagcgtgaaaacgcggcaccgagtcggtgcattaaagaaaatatcatctttggtgtttcctacgatgaatatagatttcccgcggttctatctagttacgcgttaaaccaactagaa

SEQ ID NO: 1718 - RNA, 186 nt, synthetic construct
  source 1..186: mol_type = other RNA
gtctgtatctatattcatcatgtttaagagcggggaaatccgcaagtttaaataaggctagtccgttatcagcgtgaaaacgcggcaccgagtcggtgcattaaagaaaatatcatctttggtgtttcctatgatgaatatagattatccgcggttctatctagttacgcgttaaaccaactagaa

SEQ ID NO: 1719 - RNA, 186 nt, synthetic construct
  source 1..186: mol_type = other RNA
gtctgtatctatattcatcatgtttaagagcggggaaatccgcaagtttaaataaggctagtccgttatcagcgtgaaaacgcggcaccgagtcggtgcattaaagaaaatatcatctttggtgtttcgtatgatgaatatagatttctcgcggttctatctagttacgcgttaaaccaactagaa

SEQ ID NO: 1720 - RNA, 186 nt, synthetic construct
  source 1..186: mol_type = other RNA
gtctgtatctatattcatcatgtttaagagcggggaaatccgcaagtttaaataaggctagtccgttatcagcgtgaaaacgcggcaccgagtcggtgcattaaagaaaatatcatctttggtgtttcttatgatgaatatagatttcccgcggttctatctagttacgcgttaaaccaactagaa

SEQ ID NO: 1721 - RNA, 186 nt, synthetic construct
  source 1..186: mol_type = other RNA
gtctgtatctatattcatcatgtttaagagcggggaaatccgcaagtttaaataaggctagtccgttatcagcgtgaaaacgcggcaccgagtcggtgcattaaagaaaatattatatttggtgtttcctatgatgaatatagattgtccgcggttctatctagttacgcgttaaaccaactagaa

SEQ ID NO: 1722 - RNA, 186 nt, synthetic construct
  source 1..186: mol_type = other RNA
gtctgtatctatattcatcatgtttaagagcggggaaatccgcaagtttaaataaggctagtccgttatcagcgtgaaaacgcggcaccgagtcggtgcattaaagaaaatattatctttggtgtttcctatgatgaatatagatgtaccgcggttctatctagttacgcgttaaaccaactagaa

SEQ ID NO: 1723 - RNA, 186 nt, synthetic construct
  source 1..186: mol_type = other RNA
gtctgtatctatattcatcatgtttaagagcggggaaatccgcaagtttaaataaggctagtccgttatcagcgtgaaaacgcggcaccgagtcggtgcattaaagagaatatcatatttggtgtttcctatgatgaatatagattgtccgcggttctatctagttacgcgttaaaccaactagaa

SEQ ID NO: 1724 - RNA, 186 nt, synthetic construct
  source 1..186: mol_type = other RNA
gtctgtatctatattcatcatgtttaagagcggggaaatccgcaagtttaaataaggctagtccgttatcagcgtgaaaacgcggcaccgagtcggtgcattaaagagaatatcatctttggtgtttcctatgatgaatatagatgtgccgcggttctatctagttacgcgttaaaccaactagaa

SEQ ID NO: 1725 - RNA, 186 nt, synthetic construct
  source 1..186: mol_type = other RNA
gtctgtatctatattcatcatgtttaagagcggggaaatccgcaagtttaaataaggctagtccgttatcagcgtgaaaacgcggcaccgagtcggtgcattaaggaaaatatcatatttggtgtttcctatgatgaatatagatgatccgcggttctatctagttacgcgttaaaccaactagaa

SEQ ID NO: 1726 - RNA, 186 nt, synthetic construct
  source 1..186: mol_type = other RNA
gtctgtatctatattcatcatgtttaagagcggggaaatccgcaagtttaaataaggctagtccgttatcagcgtgaaaacgcggcaccgagtcggtgcattaaggaaaatatcatctttggtgtttcctatgatgaatatagatgtcccgcggttctatctagttacgcgttaaaccaactagaa

SEQ ID NO: 1727 - RNA, 186 nt, synthetic construct
  source 1..186: mol_type = other RNA
gtctgtatctatattcatcatgtttaagagcggggaaatccgcaagtttaaataaggctagtccgttatcagcgtgaaaacgcggcaccgagtcggtgcattaaagaaaacataatctttggtgtttcctatgatgaatatagatgtgccgcggttctatctagttacgcgttaaaccaactagaa

SEQ ID NO: 1728 - RNA, 186 nt, synthetic construct
  source 1..186: mol_type = other RNA
gtctgtatctatattcatcatgtttaagagcggggaaatccgcaagtttaaataaggctagtccgttatcagcgtgaaaacgcggcaccgagtcggtgcattaaagaaaacatcatcttcggtgtttcctatgatgaatatagatgtcccgcggttctatctagttacgcgttaaaccaactagaa

SEQ ID NO: 1729 - RNA, 186 nt, synthetic construct
  source 1..186: mol_type = other RNA
gtctgtatctatattcatcatgtttaagagcggggaaatccgcaagtttaaataaggctagtccgttatcagcgtgaaaacgcggcaccgagtcggtgcattaaagaaaacatcatctttggagtttcctatgatgaatatagatgtgccgcggttctatctagttacgcgttaaaccaactagaa

SEQ ID NO: 1730 - RNA, 186 nt, synthetic construct
  source 1..186: mol_type = other RNA
gtctgtatctatattcatcatgtttaagagcggggaaatccgcaagtttaaataaggctagtccgttatcagcgtgaaaacgcggcaccgagtcggtgcattaaagaaaacatcatctttggcgtttcctatgatgaatatagattacacgcggttctatctagttacgcgttaaaccaactagaa

SEQ ID NO: 1731 - RNA, 186 nt, synthetic construct
  source 1..186: mol_type = other RNA
gtctgtatctatattcatcatgtttaagagcggggaaatccgcaagtttaaataaggctagtccgttatcagcgtgaaaacgcggcaccgagtcggtgcattaaagaaaacatcatctttggggtttcctatgatgaatatagattattcgcggttctatctagttacgcgttaaaccaactagaa

SEQ ID NO: 1732 - RNA, 186 nt, synthetic construct
  source 1..186: mol_type = other RNA
gtctgtatctatattcatcatgtttaagagcggggaaatccgcaagtttaaataaggctagtccgttatcagcgtgaaaacgcggcaccgagtcggtgcattaaagaaaacatcatctttggtgtatcctatgatgaatatagatgtcccgcggttctatctagttacgcgttaaaccaactagaa

SEQ ID NO: 1733 - RNA, 186 nt, synthetic construct
  source 1..186: mol_type = other RNA
gtctgtatctatattcatcatgtttaagagcggggaaatccgcaagtttaaataaggctagtccgttatcagcgtgaaaacgcggcaccgagtcggtgcattaaagaaaacatcatctttggtgtctcctatgatgaatatagatgtaccgcggttctatctagttacgcgttaaaccaactagaa

SEQ ID NO: 1734 - RNA, 186 nt, synthetic construct
  source 1..186: mol_type = other RNA
gtctgtatctatattcatcatgtttaagagcggggaaatccgcaagtttaaataaggctagtccgttatcagcgtgaaaacgcggcaccgagtcggtgcattaaagaaaacatcatctttggtgtgtcctatgatgaatatagattgtccgcggttctatctagttacgcgttaaaccaactagaa

SEQ ID NO: 1735 - RNA, 186 nt, synthetic construct
  source 1..186: mol_type = other RNA
gtctgtatctatattcatcatgtttaagagcggggaaatccgcaagtttaaataaggctagtccgttatcagcgtgaaaacgcggcaccgagtcggtgcattaaagaaaacatcatctttggtgtttcctacgatgaatatagatttcccgcggttctatctagttacgcgttaaaccaactagaa

SEQ ID NO: 1736 - RNA, 186 nt, synthetic construct
  source 1..186: mol_type = other RNA
gtctgtatctatattcatcatgtttaagagcggggaaatccgcaagtttaaataaggctagtccgttatcagcgtgaaaacgcggcaccgagtcggtgcattaaagaaaacatcatctttggtgtttcttatgatgaatatagatgatccgcggttctatctagttacgcgttaaaccaactagaa

SEQ ID NO: 1737 - RNA, 186 nt, synthetic construct
  source 1..186: mol_type = other RNA
gtctgtatctatattcatcatgtttaagagcggggaaatccgcaagtttaaataaggctagtccgttatcagcgtgaaaacgcggcaccgagtcggtgcattaaagaaaacattatctttggtgtttcctatgatgaatatagatttcccgcggttctatctagttacgcgttaaaccaactagaa

SEQ ID NO: 1738 - RNA, 186 nt, synthetic construct
  source 1..186: mol_type = other RNA
gtctgtatctatattcatcatgtttaagagcggggaaatccgcaagtttaaataaggctagtccgttatcagcgtgaaaacgcggcaccgagtcggtgcattaaagaaaatataatcttcggtgtttcctatgatgaatatagatgtcccgcggttctatctagttacgcgttaaaccaactagaa

SEQ ID NO: 1739 - RNA, 186 nt, synthetic construct
  source 1..186: mol_type = other RNA
gtctgtatctatattcatcatgtttaagagcggggaaatccgcaagtttaaataaggctagtccgttatcagcgtgaaaacgcggcaccgagtcggtgcattaaagaaaatataatctttggagtttcctatgatgaatatagatcaatcgcggttctatctagttacgcgttaaaccaactagaa

SEQ ID NO: 1740 - RNA, 186 nt, synthetic construct
  source 1..186: mol_type = other RNA
gtctgtatctatattcatcatgtttaagagcggggaaatccgcaagtttaaataaggctagtccgttatcagcgtgaaaacgcggcaccgagtcggtgcattaaagaaaatataatctttggcgtttcctatgatgaatatagattacacgcggttctatctagttacgcgttaaaccaactagaa

SEQ ID NO: 1741 - RNA, 186 nt, synthetic construct
  source 1..186: mol_type = other RNA
gtctgtatctatattcatcatgtttaagagcggggaaatccgcaagtttaaataaggctagtccgttatcagcgtgaaaacgcggcaccgagtcggtgcattaaagaaaatataatctttggggtttcctatgatgaatatagatctctcgcggttctatctagttacgcgttaaaccaactagaa

SEQ ID NO: 1742 - RNA, 186 nt, synthetic construct
  source 1..186: mol_type = other RNA
gtctgtatctatattcatcatgtttaagagcggggaaatccgcaagtttaaataaggctagtccgttatcagcgtgaaaacgcggcaccgagtcggtgcattaaagaaaatataatctttggtgtatcctatgatgaatatagatgtcacgcggttctatctagttacgcgttaaaccaactagaa

SEQ ID NO: 1743 - RNA, 186 nt, synthetic construct
  source 1..186: mol_type = other RNA
gtctgtatctatattcatcatgtttaagagcggggaaatccgcaagtttaaataaggctagtccgttatcagcgtgaaaacgcggcaccgagtcggtgcattaaagaaaatataatctttggtgtctcctatgatgaatatagatgtcccgcggttctatctagttacgcgttaaaccaactagaa

SEQ ID NO: 1744 - RNA, 186 nt, synthetic construct
  source 1..186: mol_type = other RNA
gtctgtatctatattcatcatgtttaagagcggggaaatccgcaagtttaaataaggctagtccgttatcagcgtgaaaacgcggcaccgagtcggtgcattaaagaaaatataatctttggtgtgtcctatgatgaatatagattgtacgcggttctatctagttacgcgttaaaccaactagaa

SEQ ID NO: 1745 - RNA, 186 nt, synthetic construct
  source 1..186: mol_type = other RNA
gtctgtatctatattcatcatgtttaagagcggggaaatccgcaagtttaaataaggctagtccgttatcagcgtgaaaacgcggcaccgagtcggtgcattaaagaaaatataatctttggtgtttcatatgatgaatatagatgtcccgcggttctatctagttacgcgttaaaccaactagaa

SEQ ID NO: 1746 - RNA, 186 nt, synthetic construct
  source 1..186: mol_type = other RNA
gtctgtatctatattcatcatgtttaagagcggggaaatccgcaagtttaaataaggctagtccgttatcagcgtgaaaacgcggcaccgagtcggtgcattaaagaaaatataatctttggtgtttcctacgatgaatatagatcttccgcggttctatctagttacgcgttaaaccaactagaa

SEQ ID NO: 1747 - RNA, 186 nt, synthetic construct
  source 1..186: mol_type = other RNA
gtctgtatctatattcatcatgtttaagagcggggaaatccgcaagtttaaataaggctagtccgttatcagcgtgaaaacgcggcaccgagtcggtgcattaaagaaaatataatctttggtgtttcgtatgatgaatatagatgattcgcggttctatctagttacgcgttaaaccaactagaa

SEQ ID NO: 1748 - RNA, 186 nt, synthetic construct
  source 1..186: mol_type = other RNA
gtctgtatctatattcatcatgtttaagagcggggaaatccgcaagtttaaataaggctagtccgttatcagcgtgaaaacgcggcaccgagtcggtgcattaaagaaaatataatctttggtgtttcttatgatgaatatagatgatccgcggttctatctagttacgcgttaaaccaactagaa

SEQ ID NO: 1749 - RNA, 186 nt, synthetic construct
  source 1..186: mol_type = other RNA
gtctgtatctatattcatcatgtttaagagcggggaaatccgcaagtttaaataaggctagtccgttatcagcgtgaaaacgcggcaccgagtcggtgcattaaagaaaatatcatcttcggagtttcctatgatgaatatagattattcgcggttctatctagttacgcgttaaaccaactagaa

SEQ ID NO: 1750 - RNA, 186 nt, synthetic construct
  source 1..186: mol_type = other RNA
gtctgtatctatattcatcatgtttaagagcggggaaatccgcaagtttaaataaggctagtccgttatcagcgtgaaaacgcggcaccgagtcggtgcattaaagaaaatatcatcttcggcgtttcctatgatgaatatagattatccgcggttctatctagttacgcgttaaaccaactagaa

SEQ ID NO: 1751 - RNA, 186 nt, synthetic construct
  source 1..186: mol_type = other RNA
gtctgtatctatattcatcatgtttaagagcggggaaatccgcaagtttaaataaggctagtccgttatcagcgtgaaaacgcggcaccgagtcggtgcattaaagaaaatatcatcttcggggtttcctatgatgaatatagattactcgcggttctatctagttacgcgttaaaccaactagaa

SEQ ID NO: 1752 - RNA, 186 nt, synthetic construct
  source 1..186: mol_type = other RNA
gtctgtatctatattcatcatgtttaagagcggggaaatccgcaagtttaaataaggctagtccgttatcagcgtgaaaacgcggcaccgagtcggtgcattaaagaaaatatcatcttcggtgtatcctatgatgaatatagattactcgcggttctatctagttacgcgttaaaccaactagaa

SEQ ID NO: 1753 - RNA, 186 nt, synthetic construct
  source 1..186: mol_type = other RNA
gtctgtatctatattcatcatgtttaagagcggggaaatccgcaagtttaaataaggctagtccgttatcagcgtgaaaacgcggcaccgagtcggtgcattaaagaaaatatcatcttcggtgtctcctatgatgaatatagattattcgcggttctatctagttacgcgttaaaccaactagaa

SEQ ID NO: 1754 - RNA, 186 nt, synthetic construct
  source 1..186: mol_type = other RNA
gtctgtatctatattcatcatgtttaagagcggggaaatccgcaagtttaaataaggctagtccgttatcagcgtgaaaacgcggcaccgagtcggtgcattaaagaaaatatcatcttcggtgtgtcctatgatgaatatagattactcgcggttctatctagttacgcgttaaaccaactagaa

SEQ ID NO: 1755 - RNA, 186 nt, synthetic construct
  source 1..186: mol_type = other RNA
gtctgtatctatattcatcatgtttaagagcggggaaatccgcaagtttaaataaggctagtccgttatcagcgtgaaaacgcggcaccgagtcggtgcattaaagaaaatatcatcttcggtgtttcatatgatgaatatagatttcccgcggttctatctagttacgcgttaaaccaactagaa

SEQ ID NO: 1756 - RNA, 186 nt, synthetic construct
  source 1..186: mol_type = other RNA
gtctgtatctatattcatcatgtttaagagcggggaaatccgcaagtttaaataaggctagtccgttatcagcgtgaaaacgcggcaccgagtcggtgcattaaagaaaatatcatcttcggtgtttcctacgatgaatatagatgtcccgcggttctatctagttacgcgttaaaccaactagaa

SEQ ID NO: 1757 - RNA, 186 nt, synthetic construct
  source 1..186: mol_type = other RNA
gtctgtatctatattcatcatgtttaagagcggggaaatccgcaagtttaaataaggctagtccgttatcagcgtgaaaacgcggcaccgagtcggtgcattaaagaaaatatcatcttcggtgtttcgtatgatgaatatagatgtctcgcggttctatctagttacgcgttaaaccaactagaa

SEQ ID NO: 1758 - RNA, 186 nt, synthetic construct
  source 1..186: mol_type = other RNA
gtctgtatctatattcatcatgtttaagagcggggaaatccgcaagtttaaataaggctagtccgttatcagcgtgaaaacgcggcaccgagtcggtgcattaaagaaaatatcatcttcggtgtttcttatgatgaatatagatttcccgcggttctatctagttacgcgttaaaccaactagaa

SEQ ID NO: 1759 - RNA, 186 nt, synthetic construct
  source 1..186: mol_type = other RNA
gtctgtatctatattcatcatgtttaagagcggggaaatccgcaagtttaaataaggctagtccgttatcagcgtgaaaacgcggcaccgagtcggtgcattaaagaaaatatcatctttggagtatcctatgatgaatatagatgtgccgcggttctatctagttacgcgttaaaccaactagaa

SEQ ID NO: 1760 - RNA, 186 nt, synthetic construct
  source 1..186: mol_type = other RNA
gtctgtatctatattcatcatgtttaagagcggggaaatccgcaagtttaaataaggctagtccgttatcagcgtgaaaacgcggcaccgagtcggtgcattaaagaaaatatcatctttggagtctcctatgatgaatatagattattcgcggttctatctagttacgcgttaaaccaactagaa

SEQ ID NO: 1761 - RNA, 186 nt, synthetic construct
  source 1..186: mol_type = other RNA
gtctgtatctatattcatcatgtttaagagcggggaaatccgcaagtttaaataaggctagtccgttatcagcgtgaaaacgcggcaccgagtcggtgcattaaagaaaatatcatctttggagtgtcctatgatgaatatagattattcgcggttctatctagttacgcgttaaaccaactagaa

SEQ ID NO: 1762 - RNA, 186 nt, synthetic construct
  source 1..186: mol_type = other RNA
gtctgtatctatattcatcatgtttaagagcggggaaatccgcaagtttaaataaggctagtccgttatcagcgtgaaaacgcggcaccgagtcggtgcattaaagaaaatatcatctttggagtttcatatgatgaatatagatcagccgcggttctatctagttacgcgttaaaccaactagaa

SEQ ID NO: 1763 - RNA, 186 nt, synthetic construct
  source 1..186: mol_type = other RNA
gtctgtatctatattcatcatgtttaagagcggggaaatccgcaagtttaaataaggctagtccgttatcagcgtgaaaacgcggcaccgagtcggtgcattaaagaaaatatcatctttggagtttcctacgatgaatatagattactcgcggttctatctagttacgcgttaaaccaactagaa

SEQ ID NO: 1764 - RNA, 186 nt, synthetic construct
  source 1..186: mol_type = other RNA
gtctgtatctatattcatcatgtttaagagcggggaaatccgcaagtttaaataaggctagtccgttatcagcgtgaaaacgcggcaccgagtcggtgcattaaagaaaatatcatctttggagtttcgtatgatgaatatagatgtttcgcggttctatctagttacgcgttaaaccaactagaa

SEQ ID NO: 1765 - RNA, 186 nt, synthetic construct
  source 1..186: mol_type = other RNA
gtctgtatctatattcatcatgtttaagagcggggaaatccgcaagtttaaataaggctagtccgttatcagcgtgaaaacgcggcaccgagtcggtgcattaaagaaaatatcatctttggagtttcttatgatgaatatagatgtgccgcggttctatctagttacgcgttaaaccaactagaa

SEQ ID NO: 1766 - RNA, 186 nt, synthetic construct
  source 1..186: mol_type = other RNA
gtctgtatctatattcatcatgtttaagagcggggaaatccgcaagtttaaataaggctagtccgttatcagcgtgaaaacgcggcaccgagtcggtgcattaaagaaaatatcatctttggcgtatcctatgatgaatatagatcagacgcggttctatctagttacgcgttaaaccaactagaa

SEQ ID NO: 1767 - RNA, 186 nt, synthetic construct
  source 1..186: mol_type = other RNA
gtctgtatctatattcatcatgtttaagagcggggaaatccgcaagtttaaataaggctagtccgttatcagcgtgaaaacgcggcaccgagtcggtgcattaaagaaaatatcatctttggcgtctcctatgatgaatatagatcaaccgcggttctatctagttacgcgttaaaccaactagaa

SEQ ID NO: 1768 - RNA, 186 nt, synthetic construct
  source 1..186: mol_type = other RNA
gtctgtatctatattcatcatgtttaagagcggggaaatccgcaagtttaaataaggctagtccgttatcagcgtgaaaacgcggcaccgagtcggtgcattaaagaaaatatcatctttggcgtgtcctatgatgaatatagattgaacgcggttctatctagttacgcgttaaaccaactagaa

SEQ ID NO: 1769 - RNA, 186 nt, synthetic construct
  source 1..186: mol_type = other RNA
gtctgtatctatattcatcatgtttaagagcggggaaatccgcaagtttaaataaggctagtccgttatcagcgtgaaaacgcggcaccgagtcggtgcattaaagaaaatatcatctttggcgtttcatatgatgaatatagatttaccgcggttctatctagttacgcgttaaaccaactagaa

SEQ ID NO: 1770 - RNA, 186 nt, synthetic construct
  source 1..186: mol_type = other RNA
gtctgtatctatattcatcatgtttaagagcggggaaatccgcaagtttaaataaggctagtccgttatcagcgtgaaaacgcggcaccgagtcggtgcattaaagaaaatatcatctttggcgtttcctacgatgaatatagattatacgcggttctatctagttacgcgttaaaccaactagaa

SEQ ID NO: 1771 - RNA, 186 nt, synthetic construct
  source 1..186: mol_type = other RNA
gtctgtatctatattcatcatgtttaagagcggggaaatccgcaagtttaaataaggctagtccgttatcagcgtgaaaacgcggcaccgagtcggtgcattaaagaaaatatcatctttggcgtttcgtatgatgaatatagattgtccgcggttctatctagttacgcgttaaaccaactagaa

SEQ ID NO: 1772 - RNA, 186 nt, synthetic construct
  source 1..186: mol_type = other RNA
gtctgtatctatattcatcatgtttaagagcggggaaatccgcaagtttaaataaggctagtccgttatcagcgtgaaaacgcggcaccgagtcggtgcattaaagaaaatatcatctttggcgtttcttatgatgaatatagatctcacgcggttctatctagttacgcgttaaaccaactagaa

SEQ ID NO: 1773 - RNA, 186 nt, synthetic construct
  source 1..186: mol_type = other RNA
gtctgtatctatattcatcatgtttaagagcggggaaatccgcaagtttaaataaggctagtccgttatcagcgtgaaaacgcggcaccgagtcggtgcattaaagaaaatatcatctttggggtatcctatgatgaatatagattattcgcggttctatctagttacgcgttaaaccaactagaa

SEQ ID NO: 1774 - RNA, 186 nt, synthetic construct
  source 1..186: mol_type = other RNA
gtctgtatctatattcatcatgtttaagagcggggaaatccgcaagtttaaataaggctagtccgttatcagcgtgaaaacgcggcaccgagtcggtgcattaaagaaaatatcatctttggggtctcctatgatgaatatagattactcgcggttctatctagttacgcgttaaaccaactagaa

SEQ ID NO: 1775 - RNA, 186 nt, synthetic construct
  source 1..186: mol_type = other RNA
gtctgtatctatattcatcatgtttaagagcggggaaatccgcaagtttaaataaggctagtccgttatcagcgtgaaaacgcggcaccgagtcggtgcattaaagaaaatatcatctttggggtgtcctatgatgaatatagattattcgcggttctatctagttacgcgttaaaccaactagaa

SEQ ID NO: 1776 - RNA, 186 nt, synthetic construct
  source 1..186: mol_type = other RNA
gtctgtatctatattcatcatgtttaagagcggggaaatccgcaagtttaaataaggctagtccgttatcagcgtgaaaacgcggcaccgagtcggtgcattaaagaaaatatcatctttggggtttcatatgatgaatatagattaatcgcggttctatctagttacgcgttaaaccaactagaa

SEQ ID NO: 1777 - RNA, 186 nt, synthetic construct
  source 1..186: mol_type = other RNA
gtctgtatctatattcatcatgtttaagagcggggaaatccgcaagtttaaataaggctagtccgttatcagcgtgaaaacgcggcaccgagtcggtgcattaaagaaaatatcatctttggggtttcctacgatgaatatagattactcgcggttctatctagttacgcgttaaaccaactagaa

SEQ ID NO: 1778 - RNA, 186 nt, synthetic construct
  source 1..186: mol_type = other RNA
gtctgtatctatattcatcatgtttaagagcggggaaatccgcaagtttaaataaggctagtccgttatcagcgtgaaaacgcggcaccgagtcggtgcattaaagaaaatatcatctttggggtttcgtatgatgaatatagatgtctcgcggttctatctagttacgcgttaaaccaactagaa

SEQ ID NO: 1779 - RNA, 186 nt, synthetic construct
  source 1..186: mol_type = other RNA
gtctgtatctatattcatcatgtttaagagcggggaaatccgcaagtttaaataaggctagtccgttatcagcgtgaaaacgcggcaccgagtcggtgcattaaagaaaatatcatctttggggtttcttatgatgaatatagatgtctcgcggttctatctagttacgcgttaaaccaactagaa

SEQ ID NO: 1780 - RNA, 186 nt, synthetic construct
  source 1..186: mol_type = other RNA
gtctgtatctatattcatcatgtttaagagcggggaaatccgcaagtttaaataaggctagtccgttatcagcgtgaaaacgcggcaccgagtcggtgcattaaagaaaatatcatctttggtgtatcatatgatgaatatagatttcccgcggttctatctagttacgcgttaaaccaactagaa

SEQ ID NO: 1781 - RNA, 186 nt, synthetic construct
  source 1..186: mol_type = other RNA
gtctgtatctatattcatcatgtttaagagcggggaaatccgcaagtttaaataaggctagtccgttatcagcgtgaaaacgcggcaccgagtcggtgcattaaagaaaatatcatctttggtgtatcctacgatgaatatagatttgccgcggttctatctagttacgcgttaaaccaactagaa

SEQ ID NO: 1782 - RNA, 186 nt, synthetic construct
  source 1..186: mol_type = other RNA
gtctgtatctatattcatcatgtttaagagcggggaaatccgcaagtttaaataaggctagtccgttatcagcgtgaaaacgcggcaccgagtcggtgcattaaagaaaatatcatctttggtgtatcgtatgatgaatatagattaggcgcggttctatctagttacgcgttaaaccaactagaa

SEQ ID NO: 1783 - RNA, 186 nt, synthetic construct
  source 1..186: mol_type = other RNA
gtctgtatctatattcatcatgtttaagagcggggaaatccgcaagtttaaataaggctagtccgttatcagcgtgaaaacgcggcaccgagtcggtgcattaaagaaaatatcatctttggtgtatcttatgatgaatatagatttcccgcggttctatctagttacgcgttaaaccaactagaa

SEQ ID NO: 1784 - RNA, 186 nt, synthetic construct
  source 1..186: mol_type = other RNA
gtctgtatctatattcatcatgtttaagagcggggaaatccgcaagtttaaataaggctagtccgttatcagcgtgaaaacgcggcaccgagtcggtgcattaaagaaaatatcatctttggtgtctcatatgatgaatatagatctctcgcggttctatctagttacgcgttaaaccaactagaa

SEQ ID NO: 1785 - RNA, 186 nt, synthetic construct
  source 1..186: mol_type = other RNA
gtctgtatctatattcatcatgtttaagagcggggaaatccgcaagtttaaataaggctagtccgttatcagcgtgaaaacgcggcaccgagtcggtgcattaaagaaaatatcatctttggtgtctcctacgatgaatatagattactcgcggttctatctagttacgcgttaaaccaactagaa

SEQ ID NO: 1786 - RNA, 186 nt, synthetic construct
  source 1..186: mol_type = other RNA
gtctgtatctatattcatcatgtttaagagcggggaaatccgcaagtttaaataaggctagtccgttatcagcgtgaaaacgcggcaccgagtcggtgcattaaagaaaatatcatctttggtgtctcgtatgatgaatatagattactcgcggttctatctagttacgcgttaaaccaactagaa

SEQ ID NO: 1787 - RNA, 186 nt, synthetic construct
  source 1..186: mol_type = other RNA
gtctgtatctatattcatcatgtttaagagcggggaaatccgcaagtttaaataaggctagtccgttatcagcgtgaaaacgcggcaccgagtcggtgcattaaagaaaatatcatctttggtgtctcttatgatgaatatagatttcccgcggttctatctagttacgcgttaaaccaactagaa

SEQ ID NO: 1788 - RNA, 186 nt, synthetic construct
  source 1..186: mol_type = other RNA
gtctgtatctatattcatcatgtttaagagcggggaaatccgcaagtttaaataaggctagtccgttatcagcgtgaaaacgcggcaccgagtcggtgcattaaagaaaatatcatctttggtgtgtcatatgatgaatatagattatccgcggttctatctagttacgcgttaaaccaactagaa

SEQ ID NO: 1789 - RNA, 186 nt, synthetic construct
  source 1..186: mol_type = other RNA
gtctgtatctatattcatcatgtttaagagcggggaaatccgcaagtttaaataaggctagtccgttatcagcgtgaaaacgcggcaccgagtcggtgcattaaagaaaatatcatctttggtgtgtcctacgatgaatatagattgtccgcggttctatctagttacgcgttaaaccaactagaa

SEQ ID NO: 1790 - RNA, 186 nt, synthetic construct
  source 1..186: mol_type = other RNA
gtctgtatctatattcatcatgtttaagagcggggaaatccgcaagtttaaataaggctagtccgttatcagcgtgaaaacgcggcaccgagtcggtgcattaaagaaaatatcatctttggtgtgtcgtatgatgaatatagatgtttcgcggttctatctagttacgcgttaaaccaactagaa

SEQ ID NO: 1791 - RNA, 186 nt, synthetic construct
  source 1..186: mol_type = other RNA
gtctgtatctatattcatcatgtttaagagcggggaaatccgcaagtttaaataaggctagtccgttatcagcgtgaaaacgcggcaccgagtcggtgcattaaagaaaatatcatctttggtgtgtcttatgatgaatatagatgtcccgcggttctatctagttacgcgttaaaccaactagaa

SEQ ID NO: 1792 - RNA, 186 nt, synthetic construct
  source 1..186: mol_type = other RNA
gtctgtatctatattcatcatgtttaagagcggggaaatccgcaagtttaaataaggctagtccgttatcagcgtgaaaacgcggcaccgagtcggtgcattaaagaaaatatcatctttggtgttagctatgatgaatatagattacacgcggttctatctagttacgcgttaaaccaactagaa

SEQ ID NO: 1793 - RNA, 186 nt, synthetic construct
  source 1..186: mol_type = other RNA
gtctgtatctatattcatcatgtttaagagcggggaaatccgcaagtttaaataaggctagtccgttatcagcgtgaaaacgcggcaccgagtcggtgcattaaagaaaatatcatctttggtgtttcatacgatgaatatagatttcccgcggttctatctagttacgcgttaaaccaactagaa

SEQ ID NO: 1794 - RNA, 186 nt, synthetic construct
  source 1..186: mol_type = other RNA
gtctgtatctatattcatcatgtttaagagcggggaaatccgcaagtttaaataaggctagtccgttatcagcgtgaaaacgcggcaccgagtcggtgcattaaagaaaatatcatctttggtgtttcgtacgatgaatatagatttcccgcggttctatctagttacgcgttaaaccaactagaa

SEQ ID NO: 1795 - RNA, 186 nt, synthetic construct
  source 1..186: mol_type = other RNA
gtctgtatctatattcatcatgtttaagagcggggaaatccgcaagtttaaataaggctagtccgttatcagcgtgaaaacgcggcaccgagtcggtgcattaaagaaaatatcatctttggtgtttcttacgatgaatatagatgtcccgcggttctatctagttacgcgttaaaccaactagaa

SEQ ID NO: 1796 - RNA, 186 nt, synthetic construct
  source 1..186: mol_type = other RNA
gtctgtatctatattcatcatgtttaagagcggggaaatccgcaagtttaaataaggctagtccgttatcagcgtgaaaacgcggcaccgagtcggtgcattaaagaaaatattatcttcggtgtttcctatgatgaatatagatgtcccgcggttctatctagttacgcgttaaaccaactagaa

SEQ ID NO: 1797 - RNA, 186 nt, synthetic construct
  source 1..186: mol_type = other RNA
gtctgtatctatattcatcatgtttaagagcggggaaatccgcaagtttaaataaggctagtccgttatcagcgtgaaaacgcggcaccgagtcggtgcattaaagaaaatattatctttggagtttcctatgatgaatatagatgtgccgcggttctatctagttacgcgttaaaccaactagaa

SEQ ID NO: 1798 - RNA, 186 nt, synthetic construct
  source 1..186: mol_type = other RNA
gtctgtatctatattcatcatgtttaagagcggggaaatccgcaagtttaaataaggctagtccgttatcagcgtgaaaacgcggcaccgagtcggtgcattaaagaaaatattatctttggcgtttcctatgatgaatatagatttcacgcggttctatctagttacgcgttaaaccaactagaa

SEQ ID NO: 1799 - RNA, 186 nt, synthetic construct
  source 1..186: mol_type = other RNA
gtctgtatctatattcatcatgtttaagagcggggaaatccgcaagtttaaataaggctagtccgttatcagcgtgaaaacgcggcaccgagtcggtgcattaaagaaaatattatctttggggtttcctatgatgaatatagattattcgcggttctatctagttacgcgttaaaccaactagaa

SEQ ID NO: 1800 - RNA, 186 nt, synthetic construct
  source 1..186: mol_type = other RNA
gtctgtatctatattcatcatgtttaagagcggggaaatccgcaagtttaaataaggctagtccgttatcagcgtgaaaacgcggcaccgagtcggtgcattaaagaaaatattatctttggtgtatcctatgatgaatatagatctcacgcggttctatctagttacgcgttaaaccaactagaa

SEQ ID NO: 1801 - RNA, 186 nt, synthetic construct
  source 1..186: mol_type = other RNA
gtctgtatctatattcatcatgtttaagagcggggaaatccgcaagtttaaataaggctagtccgttatcagcgtgaaaacgcggcaccgagtcggtgcattaaagaaaatattatctttggtgtctcctatgatgaatatagatgtcccgcggttctatctagttacgcgttaaaccaactagaa

SEQ ID NO: 1802 - RNA, 186 nt, synthetic construct
  source 1..186: mol_type = other RNA
gtctgtatctatattcatcatgtttaagagcggggaaatccgcaagtttaaataaggctagtccgttatcagcgtgaaaacgcggcaccgagtcggtgcattaaagaaaatattatctttggtgtgtcctatgatgaatatagattgtacgcggttctatctagttacgcgttaaaccaactagaa

SEQ ID NO: 1803 - RNA, 186 nt, synthetic construct
  source 1..186: mol_type = other RNA
gtctgtatctatattcatcatgtttaagagcggggaaatccgcaagtttaaataaggctagtccgttatcagcgtgaaaacgcggcaccgagtcggtgcattaaagaaaatattatctttggtgtttcatatgatgaatatagattatccgcggttctatctagttacgcgttaaaccaactagaa

SEQ ID NO: 1804 - RNA, 186 nt, synthetic construct
  source 1..186: mol_type = other RNA
gtctgtatctatattcatcatgtttaagagcggggaaatccgcaagtttaaataaggctagtccgttatcagcgtgaaaacgcggcaccgagtcggtgcattaaagaaaatattatctttggtgtttcctacgatgaatatagatctcccgcggttctatctagttacgcgttaaaccaactagaa

SEQ ID NO: 1805 - RNA, 186 nt, synthetic construct
  source 1..186: mol_type = other RNA
gtctgtatctatattcatcatgtttaagagcggggaaatccgcaagtttaaataaggctagtccgttatcagcgtgaaaacgcggcaccgagtcggtgcattaaagaaaatattatctttggtgtttcgtatgatgaatatagatttcacgcggttctatctagttacgcgttaaaccaactagaa

SEQ ID NO: 1806 - RNA, 186 nt, synthetic construct
  source 1..186: mol_type = other RNA
gtctgtatctatattcatcatgtttaagagcggggaaatccgcaagtttaaataaggctagtccgttatcagcgtgaaaacgcggcaccgagtcggtgcattaaagaaaatattatctttggtgtttcttatgatgaatatagatttcccgcggttctatctagttacgcgttaaaccaactagaa

SEQ ID NO: 1807 - RNA, 186 nt, synthetic construct
  source 1..186: mol_type = other RNA
gtctgtatctatattcatcatgtttaagagcggggaaatccgcaagtttaaataaggctagtccgttatcagcgtgaaaacgcggcaccgagtcggtgcattaaagagaacatcatctttggtgtttcctatgatgaatatagatgtgccgcggttctatctagttacgcgttaaaccaactagaa

SEQ ID NO: 1808 - RNA, 186 nt, synthetic construct
  source 1..186: mol_type = other RNA
gtctgtatctatattcatcatgtttaagagcggggaaatccgcaagtttaaataaggctagtccgttatcagcgtgaaaacgcggcaccgagtcggtgcattaaagagaatataatctttggtgtttcctatgatgaatatagatctaccgcggttctatctagttacgcgttaaaccaactagaa

SEQ ID NO: 1809 - RNA, 186 nt, synthetic construct
  source 1..186: mol_type = other RNA
gtctgtatctatattcatcatgtttaagagcggggaaatccgcaagtttaaataaggctagtccgttatcagcgtgaaaacgcggcaccgagtcggtgcattaaagagaatatcatcttcggtgtttcctatgatgaatatagatttcccgcggttctatctagttacgcgttaaaccaactagaa

SEQ ID NO: 1810 - RNA, 186 nt, synthetic construct
  source 1..186: mol_type = other RNA
gtctgtatctatattcatcatgtttaagagcggggaaatccgcaagtttaaataaggctagtccgttatcagcgtgaaaacgcggcaccgagtcggtgcattaaagagaatatcatctttggagtttcctatgatgaatatagatgtgccgcggttctatctagttacgcgttaaaccaactagaa

SEQ ID NO: 1811 - RNA, 186 nt, synthetic construct
  source 1..186: mol_type = other RNA
gtctgtatctatattcatcatgtttaagagcggggaaatccgcaagtttaaataaggctagtccgttatcagcgtgaaaacgcggcaccgagtcggtgcattaaagagaatatcatctttggcgtttcctatgatgaatatagattacacgcggttctatctagttacgcgttaaaccaactagaa

SEQ ID NO: 1812 - RNA, 186 nt, synthetic construct
  source 1..186: mol_type = other RNA
gtctgtatctatattcatcatgtttaagagcggggaaatccgcaagtttaaataaggctagtccgttatcagcgtgaaaacgcggcaccgagtcggtgcattaaagagaatatcatctttggggtttcctatgatgaatatagattactcgcggttctatctagttacgcgttaaaccaactagaa

SEQ ID NO: 1813 - RNA, 186 nt, synthetic construct
  source 1..186: mol_type = other RNA
gtctgtatctatattcatcatgtttaagagcggggaaatccgcaagtttaaataaggctagtccgttatcagcgtgaaaacgcggcaccgagtcggtgcattaaagagaatatcatctttggtgtatcctatgatgaatatagatgtcacgcggttctatctagttacgcgttaaaccaactagaa

SEQ ID NO: 1814 - RNA, 186 nt, synthetic construct
  source 1..186: mol_type = other RNA
gtctgtatctatattcatcatgtttaagagcggggaaatccgcaagtttaaataaggctagtccgttatcagcgtgaaaacgcggcaccgagtcggtgcattaaagagaatatcatctttggtgtctcctatgatgaatatagatgtaccgcggttctatctagttacgcgttaaaccaactagaa

SEQ ID NO: 1815 - RNA, 186 nt, synthetic construct
  source 1..186: mol_type = other RNA
gtctgtatctatattcatcatgtttaagagcggggaaatccgcaagtttaaataaggctagtccgttatcagcgtgaaaacgcggcaccgagtcggtgcattaaagagaatatcatctttggtgtgtcctatgatgaatatagattgtccgcggttctatctagttacgcgttaaaccaactagaa

SEQ ID NO: 1816 - RNA, 186 nt, synthetic construct
  source 1..186: mol_type = other RNA
gtctgtatctatattcatcatgtttaagagcggggaaatccgcaagtttaaataaggctagtccgttatcagcgtgaaaacgcggcaccgagtcggtgcattaaagagaatatcatctttggtgtttcatatgatgaatatagatttcccgcggttctatctagttacgcgttaaaccaactagaa

SEQ ID NO: 1817 - RNA, 186 nt, synthetic construct
  source 1..186: mol_type = other RNA
gtctgtatctatattcatcatgtttaagagcggggaaatccgcaagtttaaataaggctagtccgttatcagcgtgaaaacgcggcaccgagtcggtgcattaaagagaatatcatctttggtgtttcctacgatgaatatagatttcccgcggttctatctagttacgcgttaaaccaactagaa

SEQ ID NO: 1818 - RNA, 186 nt, synthetic construct
  source 1..186: mol_type = other RNA
gtctgtatctatattcatcatgtttaagagcggggaaatccgcaagtttaaataaggctagtccgttatcagcgtgaaaacgcggcaccgagtcggtgcattaaagagaatatcatctttggtgtttcgtatgatgaatatagattactcgcggttctatctagttacgcgttaaaccaactagaa

SEQ ID NO: 1819 - RNA, 186 nt, synthetic construct
  source 1..186: mol_type = other RNA
gtctgtatctatattcatcatgtttaagagcggggaaatccgcaagtttaaataaggctagtccgttatcagcgtgaaaacgcggcaccgagtcggtgcattaaagagaatatcatctttggtgtttcttatgatgaatatagatgtcccgcggttctatctagttacgcgttaaaccaactagaa

SEQ ID NO: 1820 - RNA, 186 nt, synthetic construct
  source 1..186: mol_type = other RNA
gtctgtatctatattcatcatgtttaagagcggggaaatccgcaagtttaaataaggctagtccgttatcagcgtgaaaacgcggcaccgagtcggtgcattaaagagaatattatctttggtgtttcctatgatgaatatagatgtgccgcggttctatctagttacgcgttaaaccaactagaa

SEQ ID NO: 1821 - RNA, 186 nt, synthetic construct
  source 1..186: mol_type = other RNA
gtctgtatctatattcatcatgtttaagagcggggaaatccgcaagtttaaataaggctagtccgttatcagcgtgaaaacgcggcaccgagtcggtgcattaaagaaaacataatcttcggtgtttcctatgatgaatatagatttcccgcggttctatctagttacgcgttaaaccaactagaa

SEQ ID NO: 1822 - RNA, 186 nt, synthetic construct
  source 1..186: mol_type = other RNA
gtctgtatctatattcatcatgtttaagagcggggaaatccgcaagtttaaataaggctagtccgttatcagcgtgaaaacgcggcaccgagtcggtgcattaaagaaaacattatcttcggtgtttcctatgatgaatatagatttcccgcggttctatctagttacgcgttaaaccaactagaa

SEQ ID NO: 1823 - RNA, 186 nt, synthetic construct
  source 1..186: mol_type = other RNA
gtctgtatctatattcatcatgtttaagagcggggaaatccgcaagtttaaataaggctagtccgttatcagcgtgaaaacgcggcaccgagtcggtgcattaaagagaacataatcttcggtgtttcctatgatgaatatagatgtcccgcggttctatctagttacgcgttaaaccaactagaa

SEQ ID NO: 1824 - RNA, 186 nt, synthetic construct
  source 1..186: mol_type = other RNA
gtctgtatctatattcatcatgtttaagagcggggaaatccgcaagtttaaataaggctagtccgttatcagcgtgaaaacgcggcaccgagtcggtgcattaaagagaacataatctttggtgtttcctatgatgaatatagatttcccgcggttctatctagttacgcgttaaaccaactagaa

SEQ ID NO: 1825 - RNA, 186 nt, synthetic construct
  source 1..186: mol_type = other RNA
gtctgtatctatattcatcatgtttaagagcggggaaatccgcaagtttaaataaggctagtccgttatcagcgtgaaaacgcggcaccgagtcggtgcattaaagagaacattatcttcggtgtttcctatgatgaatatagattatccgcggttctatctagttacgcgttaaaccaactagaa

SEQ ID NO: 1826 - RNA, 186 nt, synthetic construct
  source 1..186: mol_type = other RNA
gtctgtatctatattcatcatgtttaagagcggggaaatccgcaagtttaaataaggctagtccgttatcagcgtgaaaacgcggcaccgagtcggtgcattaaagagaatataatcttcggtgtttcctatgatgaatatagatgtcccgcggttctatctagttacgcgttaaaccaactagaa

SEQ ID NO: 1827 - RNA, 186 nt, synthetic construct
  source 1..186: mol_type = other RNA
gtctgtatctatattcatcatgtttaagagcggggaaatccgcaagtttaaataaggctagtccgttatcagcgtgaaaacgcggcaccgagtcggtgcattaaagagaatattatcttcggtgtttcctatgatgaatatagatgtcccgcggttctatctagttacgcgttaaaccaactagaa

SEQ ID NO: 1828 - RNA, 186 nt, synthetic construct
  source 1..186: mol_type = other RNA
gtctgtatctatattcatcatgtttaagagcggggaaatccgcaagtttaaataaggctagtccgttatcagcgtgaaaacgcggcaccgagtcggtgcattaaagaaaatatcatctttggtgtaagctatgatgaatatagatgtcacgcggttctatctagttacgcgttaaaccaactagaa

SEQ ID NO: 1829 - RNA, 186 nt, synthetic construct
  source 1..186: mol_type = other RNA
gtctgtatctatattcatcatgtttaagagcggggaaatccgcaagtttaaataaggctagtccgttatcagcgtgaaaacgcggcaccgagtcggtgcattaaagaaaatatcatctttggtgtaagttacgatgaatatagatttcacgcggttctatctagttacgcgttaaaccaactagaa

SEQ ID NO: 1830 - RNA, 186 nt, synthetic construct
  source 1..186: mol_type = other RNA
gtctgtatctatattcatcatgtttaagagcggggaaatccgcaagtttaaataaggctagtccgttatcagcgtgaaaacgcggcaccgagtcggtgcattaaagaaaatatcatctttggtgtatcgtacgatgaatatagattactcgcggttctatctagttacgcgttaaaccaactagaa

SEQ ID NO: 1831 - RNA, 186 nt, synthetic construct
  source 1..186: mol_type = other RNA
gtctgtatctatattcatcatgtttaagagcggggaaatccgcaagtttaaataaggctagtccgttatcagcgtgaaaacgcggcaccgagtcggtgcattaaagaaaatatcatctttggtgtcagctacgatgaatatagattatacgcggttctatctagttacgcgttaaaccaactagaa

SEQ ID NO: 1832 - RNA, 186 nt, synthetic construct
  source 1..186: mol_type = other RNA
gtctgtatctatattcatcatgtttaagagcggggaaatccgcaagtttaaataaggctagtccgttatcagcgtgaaaacgcggcaccgagtcggtgcattaaagaaaatatcatctttggtgtcagttacgatgaatatagatttcccgcggttctatctagttacgcgttaaaccaactagaa

SEQ ID NO: 1833 - RNA, 186 nt, synthetic construct
  source 1..186: mol_type = other RNA
gtctgtatctatattcatcatgtttaagagcggggaaatccgcaagtttaaataaggctagtccgttatcagcgtgaaaacgcggcaccgagtcggtgcattaaagaaaatatcatctttggtgtctcatacgatgaatatagatttcccgcggttctatctagttacgcgttaaaccaactagaa

SEQ ID NO: 1834 - RNA, 186 nt, synthetic construct
  source 1..186: mol_type = other RNA
gtctgtatctatattcatcatgtttaagagcggggaaatccgcaagtttaaataaggctagtccgttatcagcgtgaaaacgcggcaccgagtcggtgcattaaagaaaatatcatctttggtgtgagctatgatgaatatagattgtacgcggttctatctagttacgcgttaaaccaactagaa

SEQ ID NO: 1835 - RNA, 186 nt, synthetic construct
  source 1..186: mol_type = other RNA
gtctgtatctatattcatcatgtttaagagcggggaaatccgcaagtttaaataaggctagtccgttatcagcgtgaaaacgcggcaccgagtcggtgcattaaagaaaatatcatctttggtgtgtcttacgatgaatatagatgtcccgcggttctatctagttacgcgttaaaccaactagaa

SEQ ID NO: 1836 - RNA, 186 nt, synthetic construct
  source 1..186: mol_type = other RNA
gtctgtatctatattcatcatgtttaagagcggggaaatccgcaagtttaaataaggctagtccgttatcagcgtgaaaacgcggcaccgagtcggtgcattaaagaaaatatcatctttggtgttagctacgatgaatatagatgtcacgcggttctatctagttacgcgttaaaccaactagaa

SEQ ID NO: 1837 - RNA, 186 nt, synthetic construct
  source 1..186: mol_type = other RNA
gtctgtatctatattcatcatgtttaagagcggggaaatccgcaagtttaaataaggctagtccgttatcagcgtgaaaacgcggcaccgagtcggtgcattaaagaaaatatcatctttggtgttagttatgatgaatatagattgtccgcggttctatctagttacgcgttaaaccaactagaa

SEQ ID NO: 1838 - RNA, 186 nt, synthetic construct
  source 1..186: mol_type = other RNA
gtctgtatctatattcatcatgtttaagagcggggaaatccgcaagtttaaataaggctagtccgttatcagcgtgaaaacgcggcaccgagtcggtgcattaaagaaaacataatcttcggcgtttcctatgatgaatatagatcaaccgcggttctatctagttacgcgttaaaccaactagaa

SEQ ID NO: 1839 - RNA, 186 nt, synthetic construct
  source 1..186: mol_type = other RNA
gtctgtatctatattcatcatgtttaagagcggggaaatccgcaagtttaaataaggctagtccgttatcagcgtgaaaacgcggcaccgagtcggtgcattaaagaaaacataatcttcggggtttcctatgatgaatatagattgttcgcggttctatctagttacgcgttaaaccaactagaa

SEQ ID NO: 1840 - RNA, 186 nt, synthetic construct
  source 1..186: mol_type = other RNA
gtctgtatctatattcatcatgtttaagagcggggaaatccgcaagtttaaataaggctagtccgttatcagcgtgaaaacgcggcaccgagtcggtgcattaaagaaaacataatctttggagtttcctatgatgaatatagatctaccgcggttctatctagttacgcgttaaaccaactagaa

SEQ ID NO: 1841 - RNA, 186 nt, synthetic construct
  source 1..186: mol_type = other RNA
gtctgtatctatattcatcatgtttaagagcggggaaatccgcaagtttaaataaggctagtccgttatcagcgtgaaaacgcggcaccgagtcggtgcattaaagaaaacatcatcttcggagtttcctatgatgaatatagattattcgcggttctatctagttacgcgttaaaccaactagaa

SEQ ID NO: 1842 - RNA, 186 nt, synthetic construct
  source 1..186: mol_type = other RNA
gtctgtatctatattcatcatgtttaagagcggggaaatccgcaagtttaaataaggctagtccgttatcagcgtgaaaacgcggcaccgagtcggtgcattaaagaaaacattatcttcggcgtttcctatgatgaatatagatgtaccgcggttctatctagttacgcgttaaaccaactagaa

SEQ ID NO: 1843 - RNA, 186 nt, synthetic construct
  source 1..186: mol_type = other RNA
gtctgtatctatattcatcatgtttaagagcggggaaatccgcaagtttaaataaggctagtccgttatcagcgtgaaaacgcggcaccgagtcggtgcattaaagaaaacattatctttggcgtttcctatgatgaatatagatcacacgcggttctatctagttacgcgttaaaccaactagaa

SEQ ID NO: 1844 - RNA, 186 nt, synthetic construct
  source 1..186: mol_type = other RNA
gtctgtatctatattcatcatgtttaagagcggggaaatccgcaagtttaaataaggctagtccgttatcagcgtgaaaacgcggcaccgagtcggtgcattaaagaaaatataatcttcggagtttcctatgatgaatatagatgtaccgcggttctatctagttacgcgttaaaccaactagaa

SEQ ID NO: 1845 - RNA, 186 nt, synthetic construct
  source 1..186: mol_type = other RNA
gtctgtatctatattcatcatgtttaagagcggggaaatccgcaagtttaaataaggctagtccgttatcagcgtgaaaacgcggcaccgagtcggtgcattaaagaaaatataatcttcggcgtttcctatgatgaatatagatttaccgcggttctatctagttacgcgttaaaccaactagaa

SEQ ID NO: 1846 - RNA, 186 nt, synthetic construct
  source 1..186: mol_type = other RNA
gtctgtatctatattcatcatgtttaagagcggggaaatccgcaagtttaaataaggctagtccgttatcagcgtgaaaacgcggcaccgagtcggtgcattaaagaaaatattatcttcggagtttcctatgatgaatatagatgtaccgcggttctatctagttacgcgttaaaccaactagaa

SEQ ID NO: 1847 - RNA, 186 nt, synthetic construct
  source 1..186: mol_type = other RNA
gtctgtatctatattcatcatgtttaagagcggggaaatccgcaagtttaaataaggctagtccgttatcagcgtgaaaacgcggcaccgagtcggtgcattaaagaaaatattatcttcggggtttcctatgatgaatatagattgttcgcggttctatctagttacgcgttaaaccaactagaa

SEQ ID NO: 1848 - RNA, 186 nt, synthetic construct
  source 1..186: mol_type = other RNA
gtctgtatctatattcatcatgtttaagagcggggaaatccgcaagtttaaataaggctagtccgttatcagcgtgaaaacgcggcaccgagtcggtgcataaaggagaatatcatctttggtgtttcctatgatgaatatagattgtccgcggttctatctagttacgcgttaaaccaactagaa

SEQ ID NO: 1849 - RNA, 186 nt, synthetic construct
  source 1..186: mol_type = other RNA
gtctgtatctatattcatcatgtttaagagcggggaaatccgcaagtttaaataaggctagtccgttatcagcgtgaaaacgcggcaccgagtcggtgcatcaaggagaatatcatctttggtgtttcctatgatgaatatagatgatccgcggttctatctagttacgcgttaaaccaactagaa

SEQ ID NO: 1850 - RNA, 186 nt, synthetic construct
  source 1..186: mol_type = other RNA
gtctgtatctatattcatcatgtttaagagcggggaaatccgcaagtttaaataaggctagtccgttatcagcgtgaaaacgcggcaccgagtcggtgcataaaggagaacattatcttcggagtcagttacgatgaatatagattacacgcggttctatctagttacgcgttaaaccaactagaa

SEQ ID NO: 1851 - RNA, 186 nt, synthetic construct
  source 1..186: mol_type = other RNA
gtctgtatctatattcatcatgtttaagagcggggaaatccgcaagtttaaataaggctagtccgttatcagcgtgaaaacgcggcaccgagtcggtgcataaaggagaacattatcttcggggtcagttacgatgaatatagattacacgcggttctatctagttacgcgttaaaccaactagaa

SEQ ID NO: 1852 - RNA, 186 nt, synthetic construct
  source 1..186: mol_type = other RNA
gtctgtatctatattcatcatgtttaagagcggggaaatccgcaagtttaaataaggctagtccgttatcagcgtgaaaacgcggcaccgagtcggtgcatcaaggagaacataatcttcggcgtcagttacgatgaatatagatcaaccgcggttctatctagttacgcgttaaaccaactagaa

SEQ ID NO: 1853 - RNA, 186 nt, synthetic construct
  source 1..186: mol_type = other RNA
gtctgtatctatattcatcatgtttaagagcggggaaatccgcaagtttaaataaggctagtccgttatcagcgtgaaaacgcggcaccgagtcggtgcataaaagaaaacattatcttcggtgtatcctatgatgaatatagattgtccgcggttctatctagttacgcgttaaaccaactagaa

SEQ ID NO: 1854 - RNA, 186 nt, synthetic construct
  source 1..186: mol_type = other RNA
gtctgtatctatattcatcatgtttaagagcggggaaatccgcaagtttaaataaggctagtccgttatcagcgtgaaaacgcggcaccgagtcggtgcataaaagaaaacattatctttggagtatcgtatgatgaatatagatgtatcgcggttctatctagttacgcgttaaaccaactagaa

SEQ ID NO: 1855 - RNA, 186 nt, synthetic construct
  source 1..186: mol_type = other RNA
gtctgtatctatattcatcatgtttaagagcggggaaatccgcaagtttaaataaggctagtccgttatcagcgtgaaaacgcggcaccgagtcggtgcataaaagaaaatataatctttggtgtctcgtacgatgaatatagatgttccgcggttctatctagttacgcgttaaaccaactagaa

SEQ ID NO: 1856 - RNA, 186 nt, synthetic construct
  source 1..186: mol_type = other RNA
gtctgtatctatattcatcatgtttaagagcggggaaatccgcaagtttaaataaggctagtccgttatcagcgtgaaaacgcggcaccgagtcggtgcataaaagagaacatcatcttcggcgtttcttacgatgaatatagattgcccgcggttctatctagttacgcgttaaaccaactagaa

SEQ ID NO: 1857 - RNA, 186 nt, synthetic construct
  source 1..186: mol_type = other RNA
gtctgtatctatattcatcatgtttaagagcggggaaatccgcaagtttaaataaggctagtccgttatcagcgtgaaaacgcggcaccgagtcggtgcataaaagagaatataatctttggagtcagttacgatgaatatagatcaatcgcggttctatctagttacgcgttaaaccaactagaa

SEQ ID NO: 1858 - RNA, 186 nt, synthetic construct
  source 1..186: mol_type = other RNA
gtctgtatctatattcatcatgtttaagagcggggaaatccgcaagtttaaataaggctagtccgttatcagcgtgaaaacgcggcaccgagtcggtgcataaaggaaaacattatctttggagtctcctatgatgaatatagattatccgcggttctatctagttacgcgttaaaccaactagaa

SEQ ID NO: 1859 - RNA, 186 nt, synthetic construct
  source 1..186: mol_type = other RNA
gtctgtatctatattcatcatgtttaagagcggggaaatccgcaagtttaaataaggctagtccgttatcagcgtgaaaacgcggcaccgagtcggtgcataaaggagaatatcatctttggggtcagctacgatgaatatagattatacgcggttctatctagttacgcgttaaaccaactagaa

SEQ ID NO: 1860 - RNA, 186 nt, synthetic construct
  source 1..186: mol_type = other RNA
gtctgtatctatattcatcatgtttaagagcggggaaatccgcaagtttaaataaggctagtccgttatcagcgtgaaaacgcggcaccgagtcggtgcatcaaagaaaacataatctttggcgtgtcatatgatgaatatagattgtccgcggttctatctagttacgcgttaaaccaactagaa

SEQ ID NO: 1861 - RNA, 186 nt, synthetic construct
  source 1..186: mol_type = other RNA
gtctgtatctatattcatcatgtttaagagcggggaaatccgcaagtttaaataaggctagtccgttatcagcgtgaaaacgcggcaccgagtcggtgcatcaaagaaaatattatctttggggtcagctatgatgaatatagatttcacgcggttctatctagttacgcgttaaaccaactagaa

SEQ ID NO: 1862 - RNA, 186 nt, synthetic construct
  source 1..186: mol_type = other RNA
gtctgtatctatattcatcatgtttaagagcggggaaatccgcaagtttaaataaggctagtccgttatcagcgtgaaaacgcggcaccgagtcggtgcatcaaagaaaatattatctttggggtctcatacgatgaatatagattaatcgcggttctatctagttacgcgttaaaccaactagaa

SEQ ID NO: 1863 - RNA, 186 nt, synthetic construct
  source 1..186: mol_type = other RNA
gtctgtatctatattcatcatgtttaagagcggggaaatccgcaagtttaaataaggctagtccgttatcagcgtgaaaacgcggcaccgagtcggtgcatcaaagagaacataatctttggggtatcctacgatgaatatagatgacacgcggttctatctagttacgcgttaaaccaactagaa

SEQ ID NO: 1864 - RNA, 186 nt, synthetic construct
  source 1..186: mol_type = other RNA
gtctgtatctatattcatcatgtttaagagcggggaaatccgcaagtttaaataaggctagtccgttatcagcgtgaaaacgcggcaccgagtcggtgcatcaaagagaacatcatctttggggtgagttacgatgaatatagatcttccgcggttctatctagttacgcgttaaaccaactagaa

SEQ ID NO: 1865 - RNA, 186 nt, synthetic construct
  source 1..186: mol_type = other RNA
gtctgtatctatattcatcatgtttaagagcggggaaatccgcaagtttaaataaggctagtccgttatcagcgtgaaaacgcggcaccgagtcggtgcatcaaggaaaacattatcttcggggtctcctacgatgaatatagattactcgcggttctatctagttacgcgttaaaccaactagaa

SEQ ID NO: 1866 - RNA, 186 nt, synthetic construct
  source 1..186: mol_type = other RNA
gtctgtatctatattcatcatgtttaagagcggggaaatccgcaagtttaaataaggctagtccgttatcagcgtgaaaacgcggcaccgagtcggtgcatcaaggaaaatataatctttggtgtctcgtacgatgaatatagatttgccgcggttctatctagttacgcgttaaaccaactagaa

SEQ ID NO: 1867 - RNA, 186 nt, synthetic construct
  source 1..186: mol_type = other RNA
gtctgtatctatattcatcatgtttaagagcggggaaatccgcaagtttaaataaggctagtccgttatcagcgtgaaaacgcggcaccgagtcggtgcatcaaggagaacattatcttcggcgtgtcgtatgatgaatatagatgtaccgcggttctatctagttacgcgttaaaccaactagaa

SEQ ID NO: 1868 - RNA, 186 nt, synthetic construct
  source 1..186: mol_type = other RNA
gtctgtatctatattcatcatgtttaagagcggggaaatccgcaagtttaaataaggctagtccgttatcagcgtgaaaacgcggcaccgagtcggtgcattaaagaaaacatcatcttcggggtgtcctacgatgaatatagattactcgcggttctatctagttacgcgttaaaccaactagaa

SEQ ID NO: 1869 - RNA, 186 nt, synthetic construct
  source 1..186: mol_type = other RNA
gtctgtatctatattcatcatgtttaagagcggggaaatccgcaagtttaaataaggctagtccgttatcagcgtgaaaacgcggcaccgagtcggtgcattaaagaaaatataatctttggggtgtcttacgatgaatatagatcaatcgcggttctatctagttacgcgttaaaccaactagaa

SEQ ID NO: 1870 - RNA, 186 nt, synthetic construct
  source 1..186: mol_type = other RNA
gtctgtatctatattcatcatgtttaagagcggggaaatccgcaagtttaaataaggctagtccgttatcagcgtgaaaacgcggcaccgagtcggtgcattaaagagaacattatcttcggcgtgagctatgatgaatatagatgtgacgcggttctatctagttacgcgttaaaccaactagaa

SEQ ID NO: 1871 - RNA, 186 nt, synthetic construct
  source 1..186: mol_type = other RNA
gtctgtatctatattcatcatgtttaagagcggggaaatccgcaagtttaaataaggctagtccgttatcagcgtgaaaacgcggcaccgagtcggtgcattaaagagaacattatcttcggtgtatcgtatgatgaatatagattactcgcggttctatctagttacgcgttaaaccaactagaa

SEQ ID NO: 1872 - RNA, 186 nt, synthetic construct
  source 1..186: mol_type = other RNA
gtctgtatctatattcatcatgtttaagagcggggaaatccgcaagtttaaataaggctagtccgttatcagcgtgaaaacgcggcaccgagtcggtgcattaaggaaaacataatcttcggtgtttcatatgatgaatatagatgtcccgcggttctatctagttacgcgttaaaccaactagaa

SEQ ID NO: 1873 - RNA, 186 nt, synthetic construct
  source 1..186: mol_type = other RNA
gtctgtatctatattcatcatgtttaagagcggggaaatccgcaagtttaaataaggctagtccgttatcagcgtgaaaacgcggcaccgagtcggtgcattaaggaaaacattatcttcggcgtttcgtatgatgaatatagattaaccgcggttctatctagttacgcgttaaaccaactagaa

SEQ ID NO: 1874 - RNA, 186 nt, synthetic construct
  source 1..186: mol_type = other RNA
gtctgtatctatattcatcatgtttaagagcggggaaatccgcaagtttaaataaggctagtccgttatcagcgtgaaaacgcggcaccgagtcggtgcattaaggagaacatcatcttcggggtttcctatgatgaatatagatcagtcgcggttctatctagttacgcgttaaaccaactagaa

SEQ ID NO: 1875 - RNA, 186 nt, synthetic construct
  source 1..186: mol_type = other RNA
gtctgtatctatattcatcatgtttaagagcggggaaatccgcaagtttaaataaggctagtccgttatcagcgtgaaaacgcggcaccgagtcggtgcattaaggagaacattatctttggggtaagttatgatgaatatagatgtcacgcggttctatctagttacgcgttaaaccaactagaa

SEQ ID NO: 1876 - RNA, 186 nt, synthetic construct
  source 1..186: mol_type = other RNA
gtctgtatctatattcatcatgtttaagagcggggaaatccgcaagtttaaataaggctagtccgttatcagcgtgaaaacgcggcaccgagtcggtgcattaaggagaatataatcttcggtgtgtcgtatgatgaatatagatttctcgcggttctatctagttacgcgttaaaccaactagaa

SEQ ID NO: 1877 - RNA, 186 nt, synthetic construct
  source 1..186: mol_type = other RNA
gtctgtatctatattcatcatgtttaagagcggggaaatccgcaagtttaaataaggctagtccgttatcagcgtgaaaacgcggcaccgagtcggtgcattaaggagaatattatctttggagtgtcctatgatgaatatagatgtaccgcggttctatctagttacgcgttaaaccaactagaa

SEQ ID NO: 1878 - RNA, 186 nt, synthetic construct
  source 1..186: mol_type = other RNA
gtctgtatctatattcatcatgtttaagagcggggaaatccgcaagtttaaataaggctagtccgttatcagcgtgaaaacgcggcaccgagtcggtgccattaaagaaaatatcatctttggtgtttcctatgatgaatatagatacacgcggttctatctagttacgcgttaaaccaactagaa

SEQ ID NO: 1879 - RNA, 186 nt, synthetic construct
  source 1..186: mol_type = other RNA
gtctgtatctatattcatcatgtttaagagcggggaaatccgcaagtttaaataaggctagtccgttatcagcgtgaaaacgcggcaccgagtcggtgcccattaaagaaaatatcatctttggtgtttcctatgatgaatatagataccgcggttctatctagttacgcgttaaaccaactagaa

SEQ ID NO: 1880 - RNA, 186 nt, synthetic construct
  source 1..186: mol_type = other RNA
gtctgtatctatattcatcatgtttaagagcggggaaatccgcaagtttaaataaggctagtccgttatcagcgtgaaaacgcggcaccgagtcggtgcaccattaaagaaaatatcatctttggtgtttcctatgatgaatatagatacgcggttctatctagttacgcgttaaaccaactagaa

SEQ ID NO: 1881 - RNA, 186 nt, synthetic construct
  source 1..186: mol_type = other RNA
gtctgtatctatattcatcatgtttaagagcggggaaatccgcaagtttaaataaggctagtccgttatcagcgtgaaaacgcggcaccgagtcggtgccaccattaaagaaaatatcatctttggtgtttcctatgatgaatatagatcgcggttctatctagttacgcgttaaaccaactagaa

SEQ ID NO: 1882 - RNA, 186 nt, synthetic construct
  source 1..186: mol_type = other RNA
gtctgtatctatattcatcatgtttaagagcggggaaatccgcaagtttaaataaggctagtccgttatcagcgtgaaaacgcggcaccgagtcggtgcgcaccattaaagaaaatatcatctttggtgtttcctatgatgaatatagacgcggttctatctagttacgcgttaaaccaactagaa

SEQ ID NO: 1883 - RNA, 186 nt, synthetic construct
  source 1..186: mol_type = other RNA
gtctgtatctatattcatcatgtttaagagcggggaaatccgcaagtttaaataaggctagtccgttatcagcgtgaaaacgcggcaccgagtcggtgcggcaccattaaagaaaatatcatctttggtgtttcctatgatgaatatagcgcggttctatctagttacgcgttaaaccaactagaa

SEQ ID NO: 1884 - RNA, 186 nt, synthetic construct
  source 1..186: mol_type = other RNA
gtctgtatctatattcatcatgtttaagagcggggaaatccgcaagtttaaataaggctagtccgttatcagcgtgaaaacgcggcaccgagtcggtgctggcaccattaaagaaaatatcatctttggtgtttcctatgatgaatatacgcggttctatctagttacgcgttaaaccaactagaa

SEQ ID NO: 1885 - RNA, 186 nt, synthetic construct
  source 1..186: mol_type = other RNA
gtctgtatctatattcatcatgtttaagagcggggaaatccgcaagtttaaataaggctagtccgttatcagcgtgaaaacgcggcaccgagtcggtgcctggcaccattaaagaaaatatcatctttggtgtttcctatgatgaatatcgcggttctatctagttacgcgttaaaccaactagaa

SEQ ID NO: 1886 - RNA, 186 nt, synthetic construct
  source 1..186: mol_type = other RNA
gcagttttcctggattatgccgtttaagagcggggaaatccgcaagtttaaataaggctagtccgttatcagcgtgaaaacgcggcaccgagtcggtgccaccaaagatgatattttctttaatggtgccaggcataatccaggaaaaccgcggttctatctagttacgcgttaaaccaactagaa

SEQ ID NO: 1887 - RNA, 186 nt, synthetic construct
  source 1..186: mol_type = other RNA
gcagttttcctggattatgccgtttaagagcggggaaatccgcaagtttaaataaggctagtccgttatcagcgtgaaaacgcggcaccgagtcggtgcacaccaaagatgatattttctttaatggtgccaggcataatccaggaaaacgcggttctatctagttacgcgttaaaccaactagaa

SEQ ID NO: 1888 - RNA, 186 nt, synthetic construct
  source 1..186: mol_type = other RNA
gcagttttcctggattatgccgtttaagagcggggaaatccgcaagtttaaataaggctagtccgttatcagcgtgaaaacgcggcaccgagtcggtgcaacaccaaagatgatattttctttaatggtgccaggcataatccaggaaacgcggttctatctagttacgcgttaaaccaactagaa

SEQ ID NO: 1889 - RNA, 186 nt, synthetic construct
  source 1..186: mol_type = other RNA
gcagttttcctggattatgccgtttaagagcggggaaatccgcaagtttaaataaggctagtccgttatcagcgtgaaaacgcggcaccgagtcggtgcaaacaccaaagatgatattttctttaatggtgccaggcataatccaggaacgcggttctatctagttacgcgttaaaccaactagaa

SEQ ID NO: 1890 - RNA, 186 nt, synthetic construct
  source 1..186: mol_type = other RNA
gcagttttcctggattatgccgtttaagagcggggaaatccgcaagtttaaataaggctagtccgttatcagcgtgaaaacgcggcaccgagtcggtgcgaaacaccaaagatgatattttctttaatggtgccaggcataatccaggacgcggttctatctagttacgcgttaaaccaactagaa

SEQ ID NO: 1891 - RNA, 186 nt, synthetic construct
  source 1..186: mol_type = other RNA
gcagttttcctggattatgccgtttaagagcggggaaatccgcaagtttaaataaggctagtccgttatcagcgtgaaaacgcggcaccgagtcggtgcggaaacaccaaagatgatattttctttaatggtgccaggcataatccaggcgcggttctatctagttacgcgttaaaccaactagaa

SEQ ID NO: 1892 - RNA, 186 nt, synthetic construct
  source 1..186: mol_type = other RNA
gcagttttcctggattatgccgtttaagagcggggaaatccgcaagtttaaataaggctagtccgttatcagcgtgaaaacgcggcaccgagtcggtgcaggaaacaccaaagatgatattttctttaatggtgccaggcataatccagcgcggttctatctagttacgcgttaaaccaactagaa

SEQ ID NO: 1893 - RNA, 186 nt, synthetic construct
  source 1..186: mol_type = other RNA
gcagttttcctggattatgccgtttaagagcggggaaatccgcaagtttaaataaggctagtccgttatcagcgtgaaaacgcggcaccgagtcggtgctaggaaacaccaaagatgatattttctttaatggtgccaggcataatccacgcggttctatctagttacgcgttaaaccaactagaa

SEQ ID NO: 1894 - RNA, 186 nt, synthetic construct
  source 1..186: mol_type = other RNA
gttcatcataggaaacaccaagtttaagagcggggaaatccgcaagtttaaataaggctagtccgttatcagcgtgaaaacgcggcaccgagtcggtgctatgcctggcaccattaaagaaaatatcatctttggtgtttcctatgatgcgcggttctatctagttacgcgttaaaccaactagaa

SEQ ID NO: 1895 - RNA, 187 nt, synthetic construct
  source 1..187: mol_type = other RNA
gtctgtatctatattcatcatgtttaagagctagaaatagcaagtttaaataaggctagtccgttatcagcgtgaaaacgcggcaccgagtcggtgcattaaagaaaatatcatctttggtgtttcctatgatgaatatagatacattcacgcggttctatctagttacgcgttaaaccaactagaa

SEQ ID NO: 1896 - RNA, 187 nt, synthetic construct
  source 1..187: mol_type = other RNA
gcagttttcctggattatgccgtttaagagctagaaatagcaagtttaaataaggctagtccgttatcagcgtgaaaacgcggcaccgagtcggtgcggaaacaccaaagatgatattttctttaatggtgccaggcataatccagatttcgcggttctatctagttacgcgttaaaccaactagaa

SEQ ID NO: 1897 - RNA, 187 nt, synthetic construct
  source 1..187: mol_type = other RNA
gtctgtatctatattcatcatgtttaagagcggggaaatccgcaagtttaaataaggctagtccgttatcagcgtgaaaacgcggcaccgagtcggtgcccattaaagaaaatatcatctttggtgtttcctatgatgaatatagatacacgcggttctatctagttacgcgttaaaccaactagaa

SEQ ID NO: 1898 - RNA, 187 nt, synthetic construct
  source 1..187: mol_type = other RNA
gtctgtatctatattcatcatgtttaagagcggggaaatccgcaagtttaaataaggctagtccgttatcagcgtgaaaacgcggcaccgagtcggtgcaccattaaagaaaatatcatctttggtgtttcctatgatgaatatagataccgcggttctatctagttacgcgttaaaccaactagaa

SEQ ID NO: 1899 - RNA, 187 nt, synthetic construct
  source 1..187: mol_type = other RNA
gtctgtatctatattcatcatgtttaagagcggggaaatccgcaagtttaaataaggctagtccgttatcagcgtgaaaacgcggcaccgagtcggtgccaccattaaagaaaatatcatctttggtgtttcctatgatgaatatagatacgcggttctatctagttacgcgttaaaccaactagaa

SEQ ID NO: 1900 - RNA, 187 nt, synthetic construct
  source 1..187: mol_type = other RNA
gtctgtatctatattcatcatgtttaagagcggggaaatccgcaagtttaaataaggctagtccgttatcagcgtgaaaacgcggcaccgagtcggtgcgcaccattaaagaaaatatcatctttggtgtttcctatgatgaatatagatcgcggttctatctagttacgcgttaaaccaactagaa

SEQ ID NO: 1901 - RNA, 187 nt, synthetic construct
  source 1..187: mol_type = other RNA
gtctgtatctatattcatcatgtttaagagcggggaaatccgcaagtttaaataaggctagtccgttatcagcgtgaaaacgcggcaccgagtcggtgcggcaccattaaagaaaatatcatctttggtgtttcctatgatgaatatagacgcggttctatctagttacgcgttaaaccaactagaa

SEQ ID NO: 1902 - RNA, 187 nt, synthetic construct
  source 1..187: mol_type = other RNA
gtctgtatctatattcatcatgtttaagagcggggaaatccgcaagtttaaataaggctagtccgttatcagcgtgaaaacgcggcaccgagtcggtgctggcaccattaaagaaaatatcatctttggtgtttcctatgatgaatatagcgcggttctatctagttacgcgttaaaccaactagaa

SEQ ID NO: 1903 - RNA, 187 nt, synthetic construct
  source 1..187: mol_type = other RNA
gtctgtatctatattcatcatgtttaagagcggggaaatccgcaagtttaaataaggctagtccgttatcagcgtgaaaacgcggcaccgagtcggtgcctggcaccattaaagaaaatatcatctttggtgtttcctatgatgaatatacgcggttctatctagttacgcgttaaaccaactagaa

SEQ ID NO: 1904 - RNA, 187 nt, synthetic construct
  source 1..187: mol_type = other RNA
gtctgtatctatattcatcatgtttaagagcggggaaatccgcaagtttaaataaggctagtccgttatcagcgtgaaaacgcggcaccgagtcggtgccctggcaccattaaagaaaatatcatctttggtgtttcctatgatgaatatcgcggttctatctagttacgcgttaaaccaactagaa

SEQ ID NO: 1905 - RNA, 187 nt, synthetic construct
  source 1..187: mol_type = other RNA
gcagttttcctggattatgccgtttaagagcggggaaatccgcaagtttaaataaggctagtccgttatcagcgtgaaaacgcggcaccgagtcggtgcacaccaaagatgatattttctttaatggtgccaggcataatccaggaaaaccgcggttctatctagttacgcgttaaaccaactagaa

SEQ ID NO: 1906 - RNA, 187 nt, synthetic construct
  source 1..187: mol_type = other RNA
gcagttttcctggattatgccgtttaagagcggggaaatccgcaagtttaaataaggctagtccgttatcagcgtgaaaacgcggcaccgagtcggtgcaacaccaaagatgatattttctttaatggtgccaggcataatccaggaaaacgcggttctatctagttacgcgttaaaccaactagaa

SEQ ID NO: 1907 - RNA, 187 nt, synthetic construct
  source 1..187: mol_type = other RNA
gcagttttcctggattatgccgtttaagagcggggaaatccgcaagtttaaataaggctagtccgttatcagcgtgaaaacgcggcaccgagtcggtgcaaacaccaaagatgatattttctttaatggtgccaggcataatccaggaaacgcggttctatctagttacgcgttaaaccaactagaa

SEQ ID NO: 1908 - RNA, 187 nt, synthetic construct
  source 1..187: mol_type = other RNA
gcagttttcctggattatgccgtttaagagcggggaaatccgcaagtttaaataaggctagtccgttatcagcgtgaaaacgcggcaccgagtcggtgcgaaacaccaaagatgatattttctttaatggtgccaggcataatccaggaacgcggttctatctagttacgcgttaaaccaactagaa

SEQ ID NO: 1909 - RNA, 187 nt, synthetic construct
  source 1..187: mol_type = other RNA
gcagttttcctggattatgccgtttaagagcggggaaatccgcaagtttaaataaggctagtccgttatcagcgtgaaaacgcggcaccgagtcggtgcggaaacaccaaagatgatattttctttaatggtgccaggcataatccaggacgcggttctatctagttacgcgttaaaccaactagaa

SEQ ID NO: 1910 - RNA, 187 nt, synthetic construct
  source 1..187: mol_type = other RNA
gcagttttcctggattatgccgtttaagagcggggaaatccgcaagtttaaataaggctagtccgttatcagcgtgaaaacgcggcaccgagtcggtgcaggaaacaccaaagatgatattttctttaatggtgccaggcataatccaggcgcggttctatctagttacgcgttaaaccaactagaa

SEQ ID NO: 1911 - RNA, 187 nt, synthetic construct
  source 1..187: mol_type = other RNA
gcagttttcctggattatgccgtttaagagcggggaaatccgcaagtttaaataaggctagtccgttatcagcgtgaaaacgcggcaccgagtcggtgctaggaaacaccaaagatgatattttctttaatggtgccaggcataatccagcgcggttctatctagttacgcgttaaaccaactagaa

SEQ ID NO: 1912 - RNA, 187 nt, synthetic construct
  source 1..187: mol_type = other RNA
gcagttttcctggattatgccgtttaagagcggggaaatccgcaagtttaaataaggctagtccgttatcagcgtgaaaacgcggcaccgagtcggtgcataggaaacaccaaagatgatattttctttaatggtgccaggcataatccacgcggttctatctagttacgcgttaaaccaactagaa

SEQ ID NO: 1913 - RNA, 188 nt, synthetic construct
  source 1..188: mol_type = other RNA
gttcatcataggaaacaccaagttttagagctagaaatagcaagttaaaataaggctagtccgttatcaacttgaaaaagtggcaccgagtcggtgcaagaaaatatcatctttggtgtttcctatttatacgtcagggtcaggagcccccccctgaacccaggataaccctcaaagtcggggggcaa

SEQ ID NO: 1914 - RNA, 188 nt, synthetic construct
  source 1..188: mol_type = other RNA
gttcatcataggaaacaccaagttttagagctagaaatagcaagttaaaataaggctagtccgttatcaacttgaaaaagtggcaccgagtcggtgcaagaaaatatcatctttggtgtttcctatttaaacgtcagggtcaggagcccccccctgaacccaggataaccctcaaagtcggggggcaa

SEQ ID NO: 1915 - RNA, 188 nt, synthetic construct
  source 1..188: mol_type = other RNA
gcagttttcctggattatgccgtttaagagctagaaatagcaagtttaaataaggctagtccgttatcagcgtgaaaacgcggcaccgagtcggtgcaacaccaaagatgatattttctttaatggtgccaggcataatccaggaaatcttcgcggttctatctagttacgcgttaaaccaactagaa

SEQ ID NO: 1916 - RNA, 188 nt, synthetic construct
  source 1..188: mol_type = other RNA
gcagttttcctggattatgccgtttaagagctagaaatagcaagtttaaataaggctagtccgttatcagcgtgaaaacgcggcaccgagtcggtgcaccaaagatgatattttctttaatggtgccaggcataatccaggaaaacaagaccgcggttctatctagttacgcgttaaaccaactagaa

SEQ ID NO: 1917 - RNA, 188 nt, synthetic construct
  source 1..188: mol_type = other RNA
gtctgtatctatattcatcatgtttaagagcggggaaatccgcaagtttaaataaggctagtccgttatcagcgtgaaaacgcggcaccgagtcggtgcaccattaaagaaaatatcatctttggtgtttcctatgatgaatatagatacacgcggttctatctagttacgcgttaaaccaactagaa

SEQ ID NO: 1918 - RNA, 188 nt, synthetic construct
  source 1..188: mol_type = other RNA
gtctgtatctatattcatcatgtttaagagcggggaaatccgcaagtttaaataaggctagtccgttatcagcgtgaaaacgcggcaccgagtcggtgccaccattaaagaaaatatcatctttggtgtttcctatgatgaatatagataccgcggttctatctagttacgcgttaaaccaactagaa

SEQ ID NO: 1919 - RNA, 188 nt, synthetic construct
  source 1..188: mol_type = other RNA
gtctgtatctatattcatcatgtttaagagcggggaaatccgcaagtttaaataaggctagtccgttatcagcgtgaaaacgcggcaccgagtcggtgcgcaccattaaagaaaatatcatctttggtgtttcctatgatgaatatagatacgcggttctatctagttacgcgttaaaccaactagaa

SEQ ID NO: 1920 - RNA, 188 nt, synthetic construct
  source 1..188: mol_type = other RNA
gtctgtatctatattcatcatgtttaagagcggggaaatccgcaagtttaaataaggctagtccgttatcagcgtgaaaacgcggcaccgagtcggtgcggcaccattaaagaaaatatcatctttggtgtttcctatgatgaatatagatcgcggttctatctagttacgcgttaaaccaactagaa

SEQ ID NO: 1921 - RNA, 188 nt, synthetic construct
  source 1..188: mol_type = other RNA
gtctgtatctatattcatcatgtttaagagcggggaaatccgcaagtttaaataaggctagtccgttatcagcgtgaaaacgcggcaccgagtcggtgctggcaccattaaagaaaatatcatctttggtgtttcctatgatgaatatagacgcggttctatctagttacgcgttaaaccaactagaa

SEQ ID NO: 1922 - RNA, 188 nt, synthetic construct
  source 1..188: mol_type = other RNA
gtctgtatctatattcatcatgtttaagagcggggaaatccgcaagtttaaataaggctagtccgttatcagcgtgaaaacgcggcaccgagtcggtgcctggcaccattaaagaaaatatcatctttggtgtttcctatgatgaatatagcgcggttctatctagttacgcgttaaaccaactagaa

SEQ ID NO: 1923 - RNA, 188 nt, synthetic construct
  source 1..188: mol_type = other RNA
gtctgtatctatattcatcatgtttaagagcggggaaatccgcaagtttaaataaggctagtccgttatcagcgtgaaaacgcggcaccgagtcggtgccctggcaccattaaagaaaatatcatctttggtgtttcctatgatgaatatacgcggttctatctagttacgcgttaaaccaactagaa

SEQ ID NO: 1924 - RNA, 188 nt, synthetic construct
  source 1..188: mol_type = other RNA
gtctgtatctatattcatcatgtttaagagcggggaaatccgcaagtttaaataaggctagtccgttatcagcgtgaaaacgcggcaccgagtcggtgcgcctggcaccattaaagaaaatatcatctttggtgtttcctatgatgaatatcgcggttctatctagttacgcgttaaaccaactagaa

SEQ ID NO: 1925 - RNA, 188 nt, synthetic construct
  source 1..188: mol_type = other RNA
gcagttttcctggattatgccgtttaagagcggggaaatccgcaagtttaaataaggctagtccgttatcagcgtgaaaacgcggcaccgagtcggtgcaacaccaaagatgatattttctttaatggtgccaggcataatccaggaaaaccgcggttctatctagttacgcgttaaaccaactagaa

SEQ ID NO: 1926 - RNA, 188 nt, synthetic construct
  source 1..188: mol_type = other RNA
gcagttttcctggattatgccgtttaagagcggggaaatccgcaagtttaaataaggctagtccgttatcagcgtgaaaacgcggcaccgagtcggtgcaaacaccaaagatgatattttctttaatggtgccaggcataatccaggaaaacgcggttctatctagttacgcgttaaaccaactagaa

SEQ ID NO: 1927 - RNA, 188 nt, synthetic construct
  source 1..188: mol_type = other RNA
gcagttttcctggattatgccgtttaagagcggggaaatccgcaagtttaaataaggctagtccgttatcagcgtgaaaacgcggcaccgagtcggtgcgaaacaccaaagatgatattttctttaatggtgccaggcataatccaggaaacgcggttctatctagttacgcgttaaaccaactagaa

SEQ ID NO: 1928 - RNA, 188 nt, synthetic construct
  source 1..188: mol_type = other RNA
gcagttttcctggattatgccgtttaagagcggggaaatccgcaagtttaaataaggctagtccgttatcagcgtgaaaacgcggcaccgagtcggtgcggaaacaccaaagatgatattttctttaatggtgccaggcataatccaggaacgcggttctatctagttacgcgttaaaccaactagaa

SEQ ID NO: 1929 - RNA, 188 nt, synthetic construct
  source 1..188: mol_type = other RNA
gcagttttcctggattatgccgtttaagagcggggaaatccgcaagtttaaataaggctagtccgttatcagcgtgaaaacgcggcaccgagtcggtgcaggaaacaccaaagatgatattttctttaatggtgccaggcataatccaggacgcggttctatctagttacgcgttaaaccaactagaa

SEQ ID NO: 1930 - RNA, 188 nt, synthetic construct
  source 1..188: mol_type = other RNA
gcagttttcctggattatgccgtttaagagcggggaaatccgcaagtttaaataaggctagtccgttatcagcgtgaaaacgcggcaccgagtcggtgctaggaaacaccaaagatgatattttctttaatggtgccaggcataatccaggcgcggttctatctagttacgcgttaaaccaactagaa

SEQ ID NO: 1931 - RNA, 188 nt, synthetic construct
  source 1..188: mol_type = other RNA
gcagttttcctggattatgccgtttaagagcggggaaatccgcaagtttaaataaggctagtccgttatcagcgtgaaaacgcggcaccgagtcggtgcataggaaacaccaaagatgatattttctttaatggtgccaggcataatccagcgcggttctatctagttacgcgttaaaccaactagaa

SEQ ID NO: 1932 - RNA, 188 nt, synthetic construct
  source 1..188: mol_type = other RNA
gcagttttcctggattatgccgtttaagagcggggaaatccgcaagtttaaataaggctagtccgttatcagcgtgaaaacgcggcaccgagtcggtgccataggaaacaccaaagatgatattttctttaatggtgccaggcataatccacgcggttctatctagttacgcgttaaaccaactagaa

SEQ ID NO: 1933 - RNA, 189 nt, synthetic construct
  source 1..189: mol_type = other RNA
gcagttttcctggattatgccgtttaagagctagaaatagcaagtttaaataaggctagtccgttatcagcgtgaaaacgcggcaccgagtcggtgcggaaacaccaaagatgatattttctttaatggtgccaggcataatccaggataaccgcggttctatctagttacgcgttaaaccaactagaa

SEQ ID NO: 1934 - RNA, 189 nt, synthetic construct
  source 1..189: mol_type = other RNA
gcagttttcctggattatgccgtttaagagcggggaaatccgcaagtttaaataaggctagtccgttatcagcgtgaaaacgcggcaccgagtcggtgcaacaccaaagataatattttctttaatggtgccaggcataatccaggaatgttcgcggttctatctagttacgcgttaaaccaactagaa

SEQ ID NO: 1935 - RNA, 189 nt, synthetic construct
  source 1..189: mol_type = other RNA
gcagttttcctggattatgccgtttaagagcggggaaatccgcaagtttaaataaggctagtccgttatcagcgtgaaaacgcggcaccgagtcggtgcaacaccaaagatgatattctctttaatggtgccaggcataatccaggaatgttcgcggttctatctagttacgcgttaaaccaactagaa

SEQ ID NO: 1936 - RNA, 189 nt, synthetic construct
  source 1..189: mol_type = other RNA
gcagttttcctggattatgccgtttaagagcggggaaatccgcaagtttaaataaggctagtccgttatcagcgtgaaaacgcggcaccgagtcggtgcaacaccaaagatgatattttccttaatggtgccaggcataatccaggaattttcgcggttctatctagttacgcgttaaaccaactagaa

SEQ ID NO: 1937 - RNA, 189 nt, synthetic construct
  source 1..189: mol_type = other RNA
gcagttttcctggattatgccgtttaagagcggggaaatccgcaagtttaaataaggctagtccgttatcagcgtgaaaacgcggcaccgagtcggtgcaacaccaaagatgatattttctttaatagtgccaggcataatccaggaattttcgcggttctatctagttacgcgttaaaccaactagaa

SEQ ID NO: 1938 - RNA, 189 nt, synthetic construct
  source 1..189: mol_type = other RNA
gcagttttcctggattatgccgtttaagagcggggaaatccgcaagtttaaataaggctagtccgttatcagcgtgaaaacgcggcaccgagtcggtgcaacaccaaagatgatattttctttaatcgtgccaggcataatccaggaattcacgcggttctatctagttacgcgttaaaccaactagaa

SEQ ID NO: 1939 - RNA, 189 nt, synthetic construct
  source 1..189: mol_type = other RNA
gcagttttcctggattatgccgtttaagagcggggaaatccgcaagtttaaataaggctagtccgttatcagcgtgaaaacgcggcaccgagtcggtgcaacaccaaagatgatattttctttaatggtaccaggcataatccaggaattttcgcggttctatctagttacgcgttaaaccaactagaa

SEQ ID NO: 1940 - RNA, 189 nt, synthetic construct
  source 1..189: mol_type = other RNA
gcagttttcctggattatgccgtttaagagcggggaaatccgcaagtttaaataaggctagtccgttatcagcgtgaaaacgcggcaccgagtcggtgcaacaccaaagatgatattttctttaatggtcccaggcataatccaggaagtctcgcggttctatctagttacgcgttaaaccaactagaa

SEQ ID NO: 1941 - RNA, 189 nt, synthetic construct
  source 1..189: mol_type = other RNA
gcagttttcctggattatgccgtttaagagcggggaaatccgcaagtttaaataaggctagtccgttatcagcgtgaaaacgcggcaccgagtcggtgcaacaccaaagatgatattttctttaatggtgccaggcataatccaggaatgttcgcggttctatctagttacgcgttaaaccaactagaa

SEQ ID NO: 1942 - RNA, 189 nt, synthetic construct
  source 1..189: mol_type = other RNA
gcagttttcctggattatgccgtttaagagcggggaaatccgcaagtttaaataaggctagtccgttatcagcgtgaaaacgcggcaccgagtcggtgcaacaccaaagatgatattttctttaatggtgcccggcataatccaggaagtctcgcggttctatctagttacgcgttaaaccaactagaa

SEQ ID NO: 1943 - RNA, 189 nt, synthetic construct
  source 1..189: mol_type = other RNA
gcagttttcctggattatgccgtttaagagcggggaaatccgcaagtttaaataaggctagtccgttatcagcgtgaaaacgcggcaccgagtcggtgcaacaccaaagatgatattttctttaatggtgccgggcataatccaggaagtctcgcggttctatctagttacgcgttaaaccaactagaa

SEQ ID NO: 1944 - RNA, 189 nt, synthetic construct
  source 1..189: mol_type = other RNA
gcagttttcctggattatgccgtttaagagcggggaaatccgcaagtttaaataaggctagtccgttatcagcgtgaaaacgcggcaccgagtcggtgcaacaccaaagatgatattttctttaatggtgcctggcataatccaggaatgttcgcggttctatctagttacgcgttaaaccaactagaa

SEQ ID NO: 1945 - RNA, 189 nt, synthetic construct
  source 1..189: mol_type = other RNA
gcagttttcctggattatgccgtttaagagcggggaaatccgcaagtttaaataaggctagtccgttatcagcgtgaaaacgcggcaccgagtcggtgcaacaccaaagatgatattttctttaatggttccaggcataatccaggaagtctcgcggttctatctagttacgcgttaaaccaactagaa

SEQ ID NO: 1946 - RNA, 189 nt, synthetic construct
  source 1..189: mol_type = other RNA
gcagttttcctggattatgccgtttaagagcggggaaatccgcaagtttaaataaggctagtccgttatcagcgtgaaaacgcggcaccgagtcggtgcaacaccaaagatgatattttctttaattgtgccaggcataatccaggaattcccgcggttctatctagttacgcgttaaaccaactagaa

SEQ ID NO: 1947 - RNA, 189 nt, synthetic construct
  source 1..189: mol_type = other RNA
gcagttttcctggattatgccgtttaagagcggggaaatccgcaagtttaaataaggctagtccgttatcagcgtgaaaacgcggcaccgagtcggtgcaacaccaaagatgatattttctttgatggtgccaggcataatccaggaagtcccgcggttctatctagttacgcgttaaaccaactagaa

SEQ ID NO: 1948 - RNA, 189 nt, synthetic construct
  source 1..189: mol_type = other RNA
gcagttttcctggattatgccgtttaagagcggggaaatccgcaagtttaaataaggctagtccgttatcagcgtgaaaacgcggcaccgagtcggtgcaacaccaaagatgatattttcttttatggtgccaggcataatccaggaatgttcgcggttctatctagttacgcgttaaaccaactagaa

SEQ ID NO: 1949 - RNA, 189 nt, synthetic construct
  source 1..189: mol_type = other RNA
gcagttttcctggattatgccgtttaagagcggggaaatccgcaagtttaaataaggctagtccgttatcagcgtgaaaacgcggcaccgagtcggtgcaacaccaaagatgatgttttctttaatggtgccaggcataatccaggaatgttcgcggttctatctagttacgcgttaaaccaactagaa

SEQ ID NO: 1950 - RNA, 189 nt, synthetic construct
  source 1..189: mol_type = other RNA
gcagttttcctggattatgccgtttaagagcggggaaatccgcaagtttaaataaggctagtccgttatcagcgtgaaaacgcggcaccgagtcggtgcaacaccaaagattatattttctttaatggtgccaggcataatccaggaagtctcgcggttctatctagttacgcgttaaaccaactagaa

SEQ ID NO: 1951 - RNA, 189 nt, synthetic construct
  source 1..189: mol_type = other RNA
gcagttttcctggattatgccgtttaagagcggggaaatccgcaagtttaaataaggctagtccgttatcagcgtgaaaacgcggcaccgagtcggtgcaacaccgaagatgatattttctttaatggtgccaggcataatccaggaatgttcgcggttctatctagttacgcgttaaaccaactagaa

SEQ ID NO: 1952 - RNA, 189 nt, synthetic construct
  source 1..189: mol_type = other RNA
gcagttttcctggattatgccgtttaagagcggggaaatccgcaagtttaaataaggctagtccgttatcagcgtgaaaacgcggcaccgagtcggtgcaaccccaaagatgatattttctttaatggtgccaggcataatccaggaattttcgcggttctatctagttacgcgttaaaccaactagaa

SEQ ID NO: 1953 - RNA, 189 nt, synthetic construct
  source 1..189: mol_type = other RNA
gcagttttcctggattatgccgtttaagagcggggaaatccgcaagtttaaataaggctagtccgttatcagcgtgaaaacgcggcaccgagtcggtgcaacgccaaagatgatattttctttaatggtgccaggcataatccaggaatgttcgcggttctatctagttacgcgttaaaccaactagaa

SEQ ID NO: 1954 - RNA, 189 nt, synthetic construct
  source 1..189: mol_type = other RNA
gcagttttcctggattatgccgtttaagagcggggaaatccgcaagtttaaataaggctagtccgttatcagcgtgaaaacgcggcaccgagtcggtgcaactccaaagatgatattttctttaatggtgccaggcataatccaggaattttcgcggttctatctagttacgcgttaaaccaactagaa

SEQ ID NO: 1955 - RNA, 189 nt, synthetic construct
  source 1..189: mol_type = other RNA
gcagttttcctggattatgccgtttaagagcggggaaatccgcaagtttaaataaggctagtccgttatcagcgtgaaaacgcggcaccgagtcggtgccacaccaaagatgatattttctttaatggtgccaggcataatccaggaagtctcgcggttctatctagttacgcgttaaaccaactagaa

SEQ ID NO: 1956 - RNA, 189 nt, synthetic construct
  source 1..189: mol_type = other RNA
gcagttttcctggattatgccgtttaagagcggggaaatccgcaagtttaaataaggctagtccgttatcagcgtgaaaacgcggcaccgagtcggtgcgacaccaaagatgatattttctttaatggtgccaggcataatccaggaagtctcgcggttctatctagttacgcgttaaaccaactagaa

SEQ ID NO: 1957 - RNA, 189 nt, synthetic construct
  source 1..189: mol_type = other RNA
gcagttttcctggattatgccgtttaagagcggggaaatccgcaagtttaaataaggctagtccgttatcagcgtgaaaacgcggcaccgagtcggtgctacaccaaagatgatattttctttaatggtgccaggcataatccaggaatgttcgcggttctatctagttacgcgttaaaccaactagaa

SEQ ID NO: 1958 - RNA, 189 nt, synthetic construct
  source 1..189: mol_type = other RNA
gtctgtatctatattcatcatgtttaagagcggggaaatccgcaagtttaaataaggctagtccgttatcagcgtgaaaacgcggcaccgagtcggtgccaccattaaagaaaatatcatctttggtgtttcctatgatgaatatagatacacgcggttctatctagttacgcgttaaaccaactagaa

SEQ ID NO: 1959 - RNA, 189 nt, synthetic construct
  source 1..189: mol_type = other RNA
gtctgtatctatattcatcatgtttaagagcggggaaatccgcaagtttaaataaggctagtccgttatcagcgtgaaaacgcggcaccgagtcggtgcgcaccattaaagaaaatatcatctttggtgtttcctatgatgaatatagataccgcggttctatctagttacgcgttaaaccaactagaa

SEQ ID NO: 1960 - RNA, 189 nt, synthetic construct
  source 1..189: mol_type = other RNA
gtctgtatctatattcatcatgtttaagagcggggaaatccgcaagtttaaataaggctagtccgttatcagcgtgaaaacgcggcaccgagtcggtgcggcaccattaaagaaaatatcatctttggtgtttcctatgatgaatatagatacgcggttctatctagttacgcgttaaaccaactagaa

SEQ ID NO: 1961 - RNA, 189 nt, synthetic construct
  source 1..189: mol_type = other RNA
gtctgtatctatattcatcatgtttaagagcggggaaatccgcaagtttaaataaggctagtccgttatcagcgtgaaaacgcggcaccgagtcggtgctggcaccattaaagaaaatatcatctttggtgtttcctatgatgaatatagatcgcggttctatctagttacgcgttaaaccaactagaa

SEQ ID NO: 1962 - RNA, 189 nt, synthetic construct
  source 1..189: mol_type = other RNA
gtctgtatctatattcatcatgtttaagagcggggaaatccgcaagtttaaataaggctagtccgttatcagcgtgaaaacgcggcaccgagtcggtgcctggcaccattaaagaaaatatcatctttggtgtttcctatgatgaatatagacgcggttctatctagttacgcgttaaaccaactagaa

SEQ ID NO: 1963 - RNA, 189 nt, synthetic construct
  source 1..189: mol_type = other RNA
gtctgtatctatattcatcatgtttaagagcggggaaatccgcaagtttaaataaggctagtccgttatcagcgtgaaaacgcggcaccgagtcggtgccctggcaccattaaagaaaatatcatctttggtgtttcctatgatgaatatagcgcggttctatctagttacgcgttaaaccaactagaa

SEQ ID NO: 1964 - RNA, 189 nt, synthetic construct
  source 1..189: mol_type = other RNA
gtctgtatctatattcatcatgtttaagagcggggaaatccgcaagtttaaataaggctagtccgttatcagcgtgaaaacgcggcaccgagtcggtgcgcctggcaccattaaagaaaatatcatctttggtgtttcctatgatgaatatacgcggttctatctagttacgcgttaaaccaactagaa

SEQ ID NO: 1965 - RNA, 189 nt, synthetic construct
  source 1..189: mol_type = other RNA
gtctgtatctatattcatcatgtttaagagcggggaaatccgcaagtttaaataaggctagtccgttatcagcgtgaaaacgcggcaccgagtcggtgctgcctggcaccattaaagaaaatatcatctttggtgtttcctatgatgaatatcgcggttctatctagttacgcgttaaaccaactagaa

SEQ ID NO: 1966 - RNA, 189 nt, synthetic construct
  source 1..189: mol_type = other RNA
gcagttttcctggattatgccgtttaagagcggggaaatccgcaagtttaaataaggctagtccgttatcagcgtgaaaacgcggcaccgagtcggtgcaaacaccaaagatgatattttctttaatggtgccaggcataatccaggaaaaccgcggttctatctagttacgcgttaaaccaactagaa

SEQ ID NO: 1967 - RNA, 189 nt, synthetic construct
  source 1..189: mol_type = other RNA
gcagttttcctggattatgccgtttaagagcggggaaatccgcaagtttaaataaggctagtccgttatcagcgtgaaaacgcggcaccgagtcggtgcgaaacaccaaagatgatattttctttaatggtgccaggcataatccaggaaaacgcggttctatctagttacgcgttaaaccaactagaa

SEQ ID NO: 1968 - RNA, 189 nt, synthetic construct
  source 1..189: mol_type = other RNA
gcagttttcctggattatgccgtttaagagcggggaaatccgcaagtttaaataaggctagtccgttatcagcgtgaaaacgcggcaccgagtcggtgcggaaacaccaaagatgatattttctttaatggtgccaggcataatccaggaaacgcggttctatctagttacgcgttaaaccaactagaa

SEQ ID NO: 1969 - RNA, 189 nt, synthetic construct
  source 1..189: mol_type = other RNA
gcagttttcctggattatgccgtttaagagcggggaaatccgcaagtttaaataaggctagtccgttatcagcgtgaaaacgcggcaccgagtcggtgcaggaaacaccaaagatgatattttctttaatggtgccaggcataatccaggaacgcggttctatctagttacgcgttaaaccaactagaa

SEQ ID NO: 1970 - RNA, 189 nt, synthetic construct
  source 1..189: mol_type = other RNA
gcagttttcctggattatgccgtttaagagcggggaaatccgcaagtttaaataaggctagtccgttatcagcgtgaaaacgcggcaccgagtcggtgctaggaaacaccaaagatgatattttctttaatggtgccaggcataatccaggacgcggttctatctagttacgcgttaaaccaactagaa

SEQ ID NO: 1971 - RNA, 189 nt, synthetic construct
  source 1..189: mol_type = other RNA
gcagttttcctggattatgccgtttaagagcggggaaatccgcaagtttaaataaggctagtccgttatcagcgtgaaaacgcggcaccgagtcggtgcataggaaacaccaaagatgatattttctttaatggtgccaggcataatccaggcgcggttctatctagttacgcgttaaaccaactagaa

SEQ ID NO: 1972 - RNA, 189 nt, synthetic construct
  source 1..189: mol_type = other RNA
gcagttttcctggattatgccgtttaagagcggggaaatccgcaagtttaaataaggctagtccgttatcagcgtgaaaacgcggcaccgagtcggtgccataggaaacaccaaagatgatattttctttaatggtgccaggcataatccagcgcggttctatctagttacgcgttaaaccaactagaa

SEQ ID NO: 1973 - RNA, 189 nt, synthetic construct
  source 1..189: mol_type = other RNA
gcagttttcctggattatgccgtttaagagcggggaaatccgcaagtttaaataaggctagtccgttatcagcgtgaaaacgcggcaccgagtcggtgctcataggaaacaccaaagatgatattttctttaatggtgccaggcataatccacgcggttctatctagttacgcgttaaaccaactagaa

SEQ ID NO: 1974 - RNA, 190 nt, synthetic construct
  source 1..190: mol_type = other RNA
gttcatcataggaaacaccaagttttagagctagaaatagcaagttaaaataaggctagtccgttatcaacttgaaaaagtggcaccgagtcggtgcaagaaaatatcatctttggtgtttcctattcaatatcgtcagggtcaggagcccccccctgaacccaggataaccctcaaagtcggggggcaa

SEQ ID NO: 1975 - RNA, 190 nt, synthetic construct
  source 1..190: mol_type = other RNA
gttcatcataggaaacaccaagttttagagctagaaatagcaagttaaaataaggctagtccgttatcaacttgaaaaagtggcaccgagtcggtgcaagaaaatatcatctttggtgtttcctatagataagcgtcagggtcaggagcccccccctgaacccaggataaccctcaaagtcggggggcaa

SEQ ID NO: 1976 - RNA, 190 nt, synthetic construct
  source 1..190: mol_type = other RNA
gtctgtatctatattcatcatgtttaagagcggggaaatccgcaagtttaaataaggctagtccgttatcagcgtgaaaacgcggcaccgagtcggtgcgcaccattaaagaaaatatcatctttggtgtttcctatgatgaatatagatacacgcggttctatctagttacgcgttaaaccaactagaa

SEQ ID NO: 1977 - RNA, 190 nt, synthetic construct
  source 1..190: mol_type = other RNA
gtctgtatctatattcatcatgtttaagagcggggaaatccgcaagtttaaataaggctagtccgttatcagcgtgaaaacgcggcaccgagtcggtgcggcaccattaaagaaaatatcatctttggtgtttcctatgatgaatatagataccgcggttctatctagttacgcgttaaaccaactagaa

SEQ ID NO: 1978 - RNA, 190 nt, synthetic construct
  source 1..190: mol_type = other RNA
gtctgtatctatattcatcatgtttaagagcggggaaatccgcaagtttaaataaggctagtccgttatcagcgtgaaaacgcggcaccgagtcggtgctggcaccattaaagaaaatatcatctttggtgtttcctatgatgaatatagatacgcggttctatctagttacgcgttaaaccaactagaa

SEQ ID NO: 1979 - RNA, 190 nt, synthetic construct
  source 1..190: mol_type = other RNA
gtctgtatctatattcatcatgtttaagagcggggaaatccgcaagtttaaataaggctagtccgttatcagcgtgaaaacgcggcaccgagtcggtgcctggcaccattaaagaaaatatcatctttggtgtttcctatgatgaatatagatcgcggttctatctagttacgcgttaaaccaactagaa

SEQ ID NO: 1980 - RNA, 190 nt, synthetic construct
  source 1..190: mol_type = other RNA
gtctgtatctatattcatcatgtttaagagcggggaaatccgcaagtttaaataaggctagtccgttatcagcgtgaaaacgcggcaccgagtcggtgccctggcaccattaaagaaaatatcatctttggtgtttcctatgatgaatatagacgcggttctatctagttacgcgttaaaccaactagaa

SEQ ID NO: 1981 - RNA, 190 nt, synthetic construct
  source 1..190: mol_type = other RNA
gtctgtatctatattcatcatgtttaagagcggggaaatccgcaagtttaaataaggctagtccgttatcagcgtgaaaacgcggcaccgagtcggtgcgcctggcaccattaaagaaaatatcatctttggtgtttcctatgatgaatatagcgcggttctatctagttacgcgttaaaccaactagaa

SEQ ID NO: 1982 - RNA, 190 nt, synthetic construct
  source 1..190: mol_type = other RNA
gtctgtatctatattcatcatgtttaagagcggggaaatccgcaagtttaaataaggctagtccgttatcagcgtgaaaacgcggcaccgagtcggtgctgcctggcaccattaaagaaaatatcatctttggtgtttcctatgatgaatatacgcggttctatctagttacgcgttaaaccaactagaa

SEQ ID NO: 1983 - RNA, 190 nt, synthetic construct
  source 1..190: mol_type = other RNA
gtctgtatctatattcatcatgtttaagagcggggaaatccgcaagtttaaataaggctagtccgttatcagcgtgaaaacgcggcaccgagtcggtgcatgcctggcaccattaaagaaaatatcatctttggtgtttcctatgatgaatatcgcggttctatctagttacgcgttaaaccaactagaa

SEQ ID NO: 1984 - RNA, 190 nt, synthetic construct
  source 1..190: mol_type = other RNA
gcagttttcctggattatgccgtttaagagcggggaaatccgcaagtttaaataaggctagtccgttatcagcgtgaaaacgcggcaccgagtcggtgcgaaacaccaaagatgatattttctttaatggtgccaggcataatccaggaaaaccgcggttctatctagttacgcgttaaaccaactagaa

SEQ ID NO: 1985 - RNA, 190 nt, synthetic construct
  source 1..190: mol_type = other RNA
gcagttttcctggattatgccgtttaagagcggggaaatccgcaagtttaaataaggctagtccgttatcagcgtgaaaacgcggcaccgagtcggtgcggaaacaccaaagatgatattttctttaatggtgccaggcataatccaggaaaacgcggttctatctagttacgcgttaaaccaactagaa

SEQ ID NO: 1986 - RNA, 190 nt, synthetic construct
  source 1..190: mol_type = other RNA
gcagttttcctggattatgccgtttaagagcggggaaatccgcaagtttaaataaggctagtccgttatcagcgtgaaaacgcggcaccgagtcggtgcaggaaacaccaaagatgatattttctttaatggtgccaggcataatccaggaaacgcggttctatctagttacgcgttaaaccaactagaa

SEQ ID NO: 1987 - RNA, 190 nt, synthetic construct
  source 1..190: mol_type = other RNA
gcagttttcctggattatgccgtttaagagcggggaaatccgcaagtttaaataaggctagtccgttatcagcgtgaaaacgcggcaccgagtcggtgctaggaaacaccaaagatgatattttctttaatggtgccaggcataatccaggaacgcggttctatctagttacgcgttaaaccaactagaa

SEQ ID NO: 1988 - RNA, 190 nt, synthetic construct
  source 1..190: mol_type = other RNA
gcagttttcctggattatgccgtttaagagcggggaaatccgcaagtttaaataaggctagtccgttatcagcgtgaaaacgcggcaccgagtcggtgcataggaaacaccaaagatgatattttctttaatggtgccaggcataatccaggacgcggttctatctagttacgcgttaaaccaactagaa

SEQ ID NO: 1989 - RNA, 190 nt, synthetic construct
  source 1..190: mol_type = other RNA
gcagttttcctggattatgccgtttaagagcggggaaatccgcaagtttaaataaggctagtccgttatcagcgtgaaaacgcggcaccgagtcggtgccataggaaacaccaaagatgatattttctttaatggtgccaggcataatccaggcgcggttctatctagttacgcgttaaaccaactagaa

SEQ ID NO: 1990 - RNA, 190 nt, synthetic construct
  source 1..190: mol_type = other RNA
gcagttttcctggattatgccgtttaagagcggggaaatccgcaagtttaaataaggctagtccgttatcagcgtgaaaacgcggcaccgagtcggtgctcataggaaacaccaaagatgatattttctttaatggtgccaggcataatccagcgcggttctatctagttacgcgttaaaccaactagaa

SEQ ID NO: 1991 - RNA, 190 nt, synthetic construct
  source 1..190: mol_type = other RNA
gcagttttcctggattatgccgtttaagagcggggaaatccgcaagtttaaataaggctagtccgttatcagcgtgaaaacgcggcaccgagtcggtgcatcataggaaacaccaaagatgatattttctttaatggtgccaggcataatccacgcggttctatctagttacgcgttaaaccaactagaa

SEQ ID NO: 1992 - RNA, 191 nt, synthetic construct
  source 1..191: mol_type = other RNA
gcagttttcctggattatgccgtttaagagctagaaatagcaagtttaaataaggctagtccgttatcagcgtgaaaacgcggcaccgagtcggtgcggaaacaccaaagatgatattttctttaatggtgccaggcataatccaggaaacattcgcggttctatctagttacgcgttaaaccaactagaa

SEQ ID NO: 1993 - RNA, 191 nt, synthetic construct
  source 1..191: mol_type = other RNA
gcagttttcctggattatgccgtttaagagctagaaatagcaagtttaaataaggctagtccgttatcagcgtgaaaacgcggcaccgagtcggtgcaacaccaaagatgatattttctttaatggtgccaggcataatccaggaaaacaagctcgcggttctatctagttacgcgttaaaccaactagaa

SEQ ID NO: 1994 - RNA, 191 nt, synthetic construct
  source 1..191: mol_type = other RNA
gtctgtatctatattcatcatgtttaagagcggggaaatccgcaagtttaaataaggctagtccgttatcagcgtgaaaacgcggcaccgagtcggtgcggcaccattaaagaaaatatcatctttggtgtttcctatgatgaatatagatacacgcggttctatctagttacgcgttaaaccaactagaa

SEQ ID NO: 1995 - RNA, 191 nt, synthetic construct
  source 1..191: mol_type = other RNA
gtctgtatctatattcatcatgtttaagagcggggaaatccgcaagtttaaataaggctagtccgttatcagcgtgaaaacgcggcaccgagtcggtgctggcaccattaaagaaaatatcatctttggtgtttcctatgatgaatatagataccgcggttctatctagttacgcgttaaaccaactagaa

SEQ ID NO: 1996 - RNA, 191 nt, synthetic construct
  source 1..191: mol_type = other RNA
gtctgtatctatattcatcatgtttaagagcggggaaatccgcaagtttaaataaggctagtccgttatcagcgtgaaaacgcggcaccgagtcggtgcctggcaccattaaagaaaatatcatctttggtgtttcctatgatgaatatagatacgcggttctatctagttacgcgttaaaccaactagaa

SEQ ID NO: 1997 - RNA, 191 nt, synthetic construct
  source 1..191: mol_type = other RNA
gtctgtatctatattcatcatgtttaagagcggggaaatccgcaagtttaaataaggctagtccgttatcagcgtgaaaacgcggcaccgagtcggtgccctggcaccattaaagaaaatatcatctttggtgtttcctatgatgaatatagatcgcggttctatctagttacgcgttaaaccaactagaa

SEQ ID NO: 1998 - RNA, 191 nt, synthetic construct
  source 1..191: mol_type = other RNA
gtctgtatctatattcatcatgtttaagagcggggaaatccgcaagtttaaataaggctagtccgttatcagcgtgaaaacgcggcaccgagtcggtgcgcctggcaccattaaagaaaatatcatctttggtgtttcctatgatgaatatagacgcggttctatctagttacgcgttaaaccaactagaa

SEQ ID NO: 1999 - RNA, 191 nt, synthetic construct
  source 1..191: mol_type = other RNA
gtctgtatctatattcatcatgtttaagagcggggaaatccgcaagtttaaataaggctagtccgttatcagcgtgaaaacgcggcaccgagtcggtgctgcctggcaccattaaagaaaatatcatctttggtgtttcctatgatgaatatagcgcggttctatctagttacgcgttaaaccaactagaa

SEQ ID NO: 2000 - RNA, 191 nt, synthetic construct
  source 1..191: mol_type = other RNA
gtctgtatctatattcatcatgtttaagagcggggaaatccgcaagtttaaataaggctagtccgttatcagcgtgaaaacgcggcaccgagtcggtgcatgcctggcaccattaaagaaaatatcatctttggtgtttcctatgatgaatatacgcggttctatctagttacgcgttaaaccaactagaa

SEQ ID NO: 2001 - RNA, 191 nt, synthetic construct
  source 1..191: mol_type = other RNA
gtctgtatctatattcatcatgtttaagagcggggaaatccgcaagtttaaataaggctagtccgttatcagcgtgaaaacgcggcaccgagtcggtgctatgcctggcaccattaaagaaaatatcatctttggtgtttcctatgatgaatatcgcggttctatctagttacgcgttaaaccaactagaa

SEQ ID NO: 2002 - RNA, 191 nt, synthetic construct
  source 1..191: mol_type = other RNA
gcagttttcctggattatgccgtttaagagcggggaaatccgcaagtttaaataaggctagtccgttatcagcgtgaaaacgcggcaccgagtcggtgcggaaacaccaaagatgatattttctttaatggtgccaggcataatccaggaaaaccgcggttctatctagttacgcgttaaaccaactagaa

SEQ ID NO: 2003 - RNA, 191 nt, synthetic construct
  source 1..191: mol_type = other RNA
gcagttttcctggattatgccgtttaagagcggggaaatccgcaagtttaaataaggctagtccgttatcagcgtgaaaacgcggcaccgagtcggtgcaggaaacaccaaagatgatattttctttaatggtgccaggcataatccaggaaaacgcggttctatctagttacgcgttaaaccaactagaa

SEQ ID NO: 2004 - RNA, 191 nt, synthetic construct
  source 1..191: mol_type = other RNA
gcagttttcctggattatgccgtttaagagcggggaaatccgcaagtttaaataaggctagtccgttatcagcgtgaaaacgcggcaccgagtcggtgctaggaaacaccaaagatgatattttctttaatggtgccaggcataatccaggaaacgcggttctatctagttacgcgttaaaccaactagaa

SEQ ID NO: 2005 - RNA, 191 nt, synthetic construct
  source 1..191: mol_type = other RNA
gcagttttcctggattatgccgtttaagagcggggaaatccgcaagtttaaataaggctagtccgttatcagcgtgaaaacgcggcaccgagtcggtgcataggaaacaccaaagatgatattttctttaatggtgccaggcataatccaggaacgcggttctatctagttacgcgttaaaccaactagaa

SEQ ID NO: 2006 - RNA, 191 nt, synthetic construct
  source 1..191: mol_type = other RNA
gcagttttcctggattatgccgtttaagagcggggaaatccgcaagtttaaataaggctagtccgttatcagcgtgaaaacgcggcaccgagtcggtgccataggaaacaccaaagatgatattttctttaatggtgccaggcataatccaggacgcggttctatctagttacgcgttaaaccaactagaa

SEQ ID NO: 2007 - RNA, 191 nt, synthetic construct
  source 1..191: mol_type = other RNA
gcagttttcctggattatgccgtttaagagcggggaaatccgcaagtttaaataaggctagtccgttatcagcgtgaaaacgcggcaccgagtcggtgctcataggaaacaccaaagatgatattttctttaatggtgccaggcataatccaggcgcggttctatctagttacgcgttaaaccaactagaa

SEQ ID NO: 2008 - RNA, 191 nt, synthetic construct
  source 1..191: mol_type = other RNA
gcagttttcctggattatgccgtttaagagcggggaaatccgcaagtttaaataaggctagtccgttatcagcgtgaaaacgcggcaccgagtcggtgcatcataggaaacaccaaagatgatattttctttaatggtgccaggcataatccagcgcggttctatctagttacgcgttaaaccaactagaa

SEQ ID NO: 2009 - RNA, 191 nt, synthetic construct
  source 1..191: mol_type = other RNA
gcagttttcctggattatgccgtttaagagcggggaaatccgcaagtttaaataaggctagtccgttatcagcgtgaaaacgcggcaccgagtcggtgccatcataggaaacaccaaagatgatattttctttaatggtgccaggcataatccacgcggttctatctagttacgcgttaaaccaactagaa

SEQ ID NO: 2010 - RNA, 192 nt, synthetic construct
  source 1..192: mol_type = other RNA
gttcatcataggaaacaccaagttttagagctagaaatagcaagttaaaataaggctagtccgttatcaacttgaaaaagtggcaccgagtcggtgcattaaagaaaatatcatctttggtgtttcctatttatacgtcagggtcaggagcccccccctgaacccaggataaccctcaaagtcggggggcaa

SEQ ID NO: 2011 - RNA, 192 nt, synthetic construct
  source 1..192: mol_type = other RNA
gttcatcataggaaacaccaagttttagagctagaaatagcaagttaaaataaggctagtccgttatcaacttgaaaaagtggcaccgagtcggtgcattaaagaaaatatcatctttggtgtttcctatttaaacgtcagggtcaggagcccccccctgaacccaggataaccctcaaagtcggggggcaa

SEQ ID NO: 2012 - RNA, 192 nt, synthetic construct
  source 1..192: mol_type = other RNA
gtctgtatctatattcatcatgtttaagagcggggaaatccgcaagtttaaataaggctagtccgttatcagcgtgaaaacgcggcaccgagtcggtgctggcaccattaaagaaaatatcatctttggtgtttcctatgatgaatatagatacacgcggttctatctagttacgcgttaaaccaactagaa

SEQ ID NO: 2013 - RNA, 192 nt, synthetic construct
  source 1..192: mol_type = other RNA
gtctgtatctatattcatcatgtttaagagcggggaaatccgcaagtttaaataaggctagtccgttatcagcgtgaaaacgcggcaccgagtcggtgcctggcaccattaaagaaaatatcatctttggtgtttcctatgatgaatatagataccgcggttctatctagttacgcgttaaaccaactagaa

SEQ ID NO: 2014 - RNA, 192 nt, synthetic construct
  source 1..192: mol_type = other RNA
gtctgtatctatattcatcatgtttaagagcggggaaatccgcaagtttaaataaggctagtccgttatcagcgtgaaaacgcggcaccgagtcggtgccctggcaccattaaagaaaatatcatctttggtgtttcctatgatgaatatagatacgcggttctatctagttacgcgttaaaccaactagaa

SEQ ID NO: 2015 - RNA, 192 nt, synthetic construct
  source 1..192: mol_type = other RNA
gtctgtatctatattcatcatgtttaagagcggggaaatccgcaagtttaaataaggctagtccgttatcagcgtgaaaacgcggcaccgagtcggtgcgcctggcaccattaaagaaaatatcatctttggtgtttcctatgatgaatatagatcgcggttctatctagttacgcgttaaaccaactagaa

SEQ ID NO: 2016 - RNA, 192 nt, synthetic construct
  source 1..192: mol_type = other RNA
gtctgtatctatattcatcatgtttaagagcggggaaatccgcaagtttaaataaggctagtccgttatcagcgtgaaaacgcggcaccgagtcggtgctgcctggcaccattaaagaaaatatcatctttggtgtttcctatgatgaatatagacgcggttctatctagttacgcgttaaaccaactagaa

SEQ ID NO: 2017 - RNA, 192 nt, synthetic construct
  source 1..192: mol_type = other RNA
gtctgtatctatattcatcatgtttaagagcggggaaatccgcaagtttaaataaggctagtccgttatcagcgtgaaaacgcggcaccgagtcggtgcatgcctggcaccattaaagaaaatatcatctttggtgtttcctatgatgaatatagcgcggttctatctagttacgcgttaaaccaactagaa

SEQ ID NO: 2018 - RNA, 192 nt, synthetic construct
  source 1..192: mol_type = other RNA
gtctgtatctatattcatcatgtttaagagcggggaaatccgcaagtttaaataaggctagtccgttatcagcgtgaaaacgcggcaccgagtcggtgctatgcctggcaccattaaagaaaatatcatctttggtgtttcctatgatgaatatacgcggttctatctagttacgcgttaaaccaactagaa

SEQ ID NO: 2019 - RNA, 192 nt, synthetic construct
  source 1..192: mol_type = other RNA
gcagttttcctggattatgccgtttaagagcggggaaatccgcaagtttaaataaggctagtccgttatcagcgtgaaaacgcggcaccgagtcggtgcaggaaacaccaaagatgatattttctttaatggtgccaggcataatccaggaaaaccgcggttctatctagttacgcgttaaaccaactagaa

SEQ ID NO: 2020 - RNA, 192 nt, synthetic construct
  source 1..192: mol_type = other RNA
gcagttttcctggattatgccgtttaagagcggggaaatccgcaagtttaaataaggctagtccgttatcagcgtgaaaacgcggcaccgagtcggtgctaggaaacaccaaagatgatattttctttaatggtgccaggcataatccaggaaaacgcggttctatctagttacgcgttaaaccaactagaa

SEQ ID NO: 2021 - RNA, 192 nt, synthetic construct
  source 1..192: mol_type = other RNA
gcagttttcctggattatgccgtttaagagcggggaaatccgcaagtttaaataaggctagtccgttatcagcgtgaaaacgcggcaccgagtcggtgcataggaaacaccaaagatgatattttctttaatggtgccaggcataatccaggaaacgcggttctatctagttacgcgttaaaccaactagaa

SEQ ID NO: 2022 - RNA, 192 nt, synthetic construct
  source 1..192: mol_type = other RNA
gcagttttcctggattatgccgtttaagagcggggaaatccgcaagtttaaataaggctagtccgttatcagcgtgaaaacgcggcaccgagtcggtgccataggaaacaccaaagatgatattttctttaatggtgccaggcataatccaggaacgcggttctatctagttacgcgttaaaccaactagaa

SEQ ID NO: 2023 - RNA, 192 nt, synthetic construct
  source 1..192: mol_type = other RNA
gcagttttcctggattatgccgtttaagagcggggaaatccgcaagtttaaataaggctagtccgttatcagcgtgaaaacgcggcaccgagtcggtgctcataggaaacaccaaagatgatattttctttaatggtgccaggcataatccaggacgcggttctatctagttacgcgttaaaccaactagaa

SEQ ID NO: 2024 - RNA, 192 nt, synthetic construct
  source 1..192: mol_type = other RNA
gcagttttcctggattatgccgtttaagagcggggaaatccgcaagtttaaataaggctagtccgttatcagcgtgaaaacgcggcaccgagtcggtgcatcataggaaacaccaaagatgatattttctttaatggtgccaggcataatccaggcgcggttctatctagttacgcgttaaaccaactagaa

SEQ ID NO: 2025 - RNA, 192 nt, synthetic construct
  source 1..192: mol_type = other RNA
gcagttttcctggattatgccgtttaagagcggggaaatccgcaagtttaaataaggctagtccgttatcagcgtgaaaacgcggcaccgagtcggtgccatcataggaaacaccaaagatgatattttctttaatggtgccaggcataatccagcgcggttctatctagttacgcgttaaaccaactagaa

SEQ ID NO: 2026 - RNA, 192 nt, synthetic construct
  source 1..192: mol_type = other RNA
gcagttttcctggattatgccgtttaagagcggggaaatccgcaagtttaaataaggctagtccgttatcagcgtgaaaacgcggcaccgagtcggtgctcatcataggaaacaccaaagatgatattttctttaatggtgccaggcataatccacgcggttctatctagttacgcgttaaaccaactagaa

SEQ ID NO: 2027 - RNA, 193 nt, synthetic construct
  source 1..193: mol_type = other RNA
gtctgtatctatattcatcatgtttaagagcggggaaatccgcaagtttaaataaggctagtccgttatcagcgtgaaaacgcggcaccgagtcggtgcctggcaccattaaagaaaatatcatctttggtgtttcctatgatgaatatagatacacgcggttctatctagttacgcgttaaaccaactagaa

SEQ ID NO: 2028 - RNA, 193 nt, synthetic construct
  source 1..193: mol_type = other RNA
gtctgtatctatattcatcatgtttaagagcggggaaatccgcaagtttaaataaggctagtccgttatcagcgtgaaaacgcggcaccgagtcggtgccctggcaccattaaagaaaatatcatctttggtgtttcctatgatgaatatagataccgcggttctatctagttacgcgttaaaccaactagaa

SEQ ID NO: 2029 - RNA, 193 nt, synthetic construct
  source 1..193: mol_type = other RNA
gtctgtatctatattcatcatgtttaagagcggggaaatccgcaagtttaaataaggctagtccgttatcagcgtgaaaacgcggcaccgagtcggtgcgcctggcaccattaaagaaaatatcatctttggtgtttcctatgatgaatatagatacgcggttctatctagttacgcgttaaaccaactagaa

SEQ ID NO: 2030 - RNA, 193 nt, synthetic construct
  source 1..193: mol_type = other RNA
gtctgtatctatattcatcatgtttaagagcggggaaatccgcaagtttaaataaggctagtccgttatcagcgtgaaaacgcggcaccgagtcggtgctgcctggcaccattaaagaaaatatcatctttggtgtttcctatgatgaatatagatcgcggttctatctagttacgcgttaaaccaactagaa

SEQ ID NO: 2031 - RNA, 193 nt, synthetic construct
  source 1..193: mol_type = other RNA
gtctgtatctatattcatcatgtttaagagcggggaaatccgcaagtttaaataaggctagtccgttatcagcgtgaaaacgcggcaccgagtcggtgcatgcctggcaccattaaagaaaatatcatctttggtgtttcctatgatgaatatagacgcggttctatctagttacgcgttaaaccaactagaa

SEQ ID NO: 2032 - RNA, 193 nt, synthetic construct
  source 1..193: mol_type = other RNA
gtctgtatctatattcatcatgtttaagagcggggaaatccgcaagtttaaataaggctagtccgttatcagcgtgaaaacgcggcaccgagtcggtgctatgcctggcaccattaaagaaaatatcatctttggtgtttcctatgatgaatatagcgcggttctatctagttacgcgttaaaccaactagaa

SEQ ID NO: 2033 - RNA, 193 nt, synthetic construct
  source 1..193: mol_type = other RNA
gcagttttcctggattatgccgtttaagagcggggaaatccgcaagtttaaataaggctagtccgttatcagcgtgaaaacgcggcaccgagtcggtgctaggaaacaccaaagatgatattttctttaatggtgccaggcataatccaggaaaaccgcggttctatctagttacgcgttaaaccaactagaa

SEQ ID NO: 2034 - RNA, 193 nt, synthetic construct
  source 1..193: mol_type = other RNA
gcagttttcctggattatgccgtttaagagcggggaaatccgcaagtttaaataaggctagtccgttatcagcgtgaaaacgcggcaccgagtcggtgcataggaaacaccaaagatgatattttctttaatggtgccaggcataatccaggaaaacgcggttctatctagttacgcgttaaaccaactagaa

SEQ ID NO: 2035 - RNA, 193 nt, synthetic construct
  source 1..193: mol_type = other RNA
gcagttttcctggattatgccgtttaagagcggggaaatccgcaagtttaaataaggctagtccgttatcagcgtgaaaacgcggcaccgagtcggtgccataggaaacaccaaagatgatattttctttaatggtgccaggcataatccaggaaacgcggttctatctagttacgcgttaaaccaactagaa

SEQ ID NO: 2036 - RNA, 193 nt, synthetic construct
  source 1..193: mol_type = other RNA
gcagttttcctggattatgccgtttaagagcggggaaatccgcaagtttaaataaggctagtccgttatcagcgtgaaaacgcggcaccgagtcggtgctcataggaaacaccaaagatgatattttctttaatggtgccaggcataatccaggaacgcggttctatctagttacgcgttaaaccaactagaa

SEQ ID NO: 2037 - RNA, 193 nt, synthetic construct
  source 1..193: mol_type = other RNA
gcagttttcctggattatgccgtttaagagcggggaaatccgcaagtttaaataaggctagtccgttatcagcgtgaaaacgcggcaccgagtcggtgcatcataggaaacaccaaagatgatattttctttaatggtgccaggcataatccaggacgcggttctatctagttacgcgttaaaccaactagaa

SEQ ID NO: 2038 - RNA, 193 nt, synthetic construct
  source 1..193: mol_type = other RNA
gcagttttcctggattatgccgtttaagagcggggaaatccgcaagtttaaataaggctagtccgttatcagcgtgaaaacgcggcaccgagtcggtgccatcataggaaacaccaaagatgatattttctttaatggtgccaggcataatccaggcgcggttctatctagttacgcgttaaaccaactagaa

SEQ ID NO: 2039 - RNA, 193 nt, synthetic construct
  source 1..193: mol_type = other RNA
gcagttttcctggattatgccgtttaagagcggggaaatccgcaagtttaaataaggctagtccgttatcagcgtgaaaacgcggcaccgagtcggtgctcatcataggaaacaccaaagatgatattttctttaatggtgccaggcataatccagcgcggttctatctagttacgcgttaaaccaactagaa

SEQ ID NO: 2040 - RNA, 193 nt, synthetic construct
  source 1..193: mol_type = other RNA
gcagttttcctggattatgccgtttaagagcggggaaatccgcaagtttaaataaggctagtccgttatcagcgtgaaaacgcggcaccgagtcggtgcttcatcataggaaacaccaaagatgatattttctttaatggtgccaggcataatccacgcggttctatctagttacgcgttaaaccaactagaa

SEQ ID NO: 2041 - RNA, 194 nt, synthetic construct
  source 1..194: mol_type = other RNA
gttcatcataggaaacaccaagttttagagctagaaatagcaagttaaaataaggctagtccgttatcaacttgaaaaagtggcaccgagtcggtgcattaaagaaaatatcatctttggtgtttcctattcaatatcgtcagggtcaggagcccccccctgaacccaggataaccctcaaagtcggggggcaa

SEQ ID NO: 2042 - RNA, 194 nt, synthetic construct
  source 1..194: mol_type = other RNA
gttcatcataggaaacaccaagttttagagctagaaatagcaagttaaaataaggctagtccgttatcaacttgaaaaagtggcaccgagtcggtgcattaaagaaaatatcatctttggtgtttcctatagataagcgtcagggtcaggagcccccccctgaacccaggataaccctcaaagtcggggggcaa

SEQ ID NO: 2043 - RNA, 194 nt, synthetic construct
  source 1..194: mol_type = other RNA
gcagttttcctggattatgccgtttaagagctagaaatagcaagtttaaataaggctagtccgttatcagcgtgaaaacgcggcaccgagtcggtgcggaaacaccaaagatgatattttctttaatggtgccaggcataatccaggaaaacactctcgcggttctatctagttacgcgttaaaccaactagaa

SEQ ID NO: 2044 - RNA, 194 nt, synthetic construct
  source 1..194: mol_type = other RNA
gtctgtatctatattcatcatgtttaagagcggggaaatccgcaagtttaaataaggctagtccgttatcagcgtgaaaacgcggcaccgagtcggtgccctggcaccattaaagaaaatatcatctttggtgtttcctatgatgaatatagatacacgcggttctatctagttacgcgttaaaccaactagaa

SEQ ID NO: 2045 - RNA, 194 nt, synthetic construct
  source 1..194: mol_type = other RNA
gtctgtatctatattcatcatgtttaagagcggggaaatccgcaagtttaaataaggctagtccgttatcagcgtgaaaacgcggcaccgagtcggtgcgcctggcaccattaaagaaaatatcatctttggtgtttcctatgatgaatatagataccgcggttctatctagttacgcgttaaaccaactagaa

SEQ ID NO: 2046 - RNA, 194 nt, synthetic construct
  source 1..194: mol_type = other RNA
gtctgtatctatattcatcatgtttaagagcggggaaatccgcaagtttaaataaggctagtccgttatcagcgtgaaaacgcggcaccgagtcggtgctgcctggcaccattaaagaaaatatcatctttggtgtttcctatgatgaatatagatacgcggttctatctagttacgcgttaaaccaactagaa

SEQ ID NO: 2047 - RNA, 194 nt, synthetic construct
  source 1..194: mol_type = other RNA
gtctgtatctatattcatcatgtttaagagcggggaaatccgcaagtttaaataaggctagtccgttatcagcgtgaaaacgcggcaccgagtcggtgcatgcctggcaccattaaagaaaatatcatctttggtgtttcctatgatgaatatagatcgcggttctatctagttacgcgttaaaccaactagaa

SEQ ID NO: 2048 - RNA, 194 nt, synthetic construct
  source 1..194: mol_type = other RNA
gtctgtatctatattcatcatgtttaagagcggggaaatccgcaagtttaaataaggctagtccgttatcagcgtgaaaacgcggcaccgagtcggtgctatgcctggcaccattaaagaaaatatcatctttggtgtttcctatgatgaatatagacgcggttctatctagttacgcgttaaaccaactagaa

SEQ ID NO: 2049 - RNA, 194 nt, synthetic construct
  source 1..194: mol_type = other RNA
gcagttttcctggattatgccgtttaagagcggggaaatccgcaagtttaaataaggctagtccgttatcagcgtgaaaacgcggcaccgagtcggtgcataggaaacaccaaagatgatattttctttaatggtgccaggcataatccaggaaaaccgcggttctatctagttacgcgttaaaccaactagaa

SEQ ID NO: 2050 - RNA, 194 nt, synthetic construct
  source 1..194: mol_type = other RNA
gcagttttcctggattatgccgtttaagagcggggaaatccgcaagtttaaataaggctagtccgttatcagcgtgaaaacgcggcaccgagtcggtgccataggaaacaccaaagatgatattttctttaatggtgccaggcataatccaggaaaacgcggttctatctagttacgcgttaaaccaactagaa

SEQ ID NO: 2051 - RNA, 194 nt, synthetic construct
  source 1..194: mol_type = other RNA
gcagttttcctggattatgccgtttaagagcggggaaatccgcaagtttaaataaggctagtccgttatcagcgtgaaaacgcggcaccgagtcggtgctcataggaaacaccaaagatgatattttctttaatggtgccaggcataatccaggaaacgcggttctatctagttacgcgttaaaccaactagaa

SEQ ID NO: 2052 - RNA, 194 nt, synthetic construct
  source 1..194: mol_type = other RNA
gcagttttcctggattatgccgtttaagagcggggaaatccgcaagtttaaataaggctagtccgttatcagcgtgaaaacgcggcaccgagtcggtgcatcataggaaacaccaaagatgatattttctttaatggtgccaggcataatccaggaacgcggttctatctagttacgcgttaaaccaactagaa

SEQ ID NO: 2053 - RNA, 194 nt, synthetic construct
  source 1..194: mol_type = other RNA
gcagttttcctggattatgccgtttaagagcggggaaatccgcaagtttaaataaggctagtccgttatcagcgtgaaaacgcggcaccgagtcggtgccatcataggaaacaccaaagatgatattttctttaatggtgccaggcataatccaggacgcggttctatctagttacgcgttaaaccaactagaa

SEQ ID NO: 2054 - RNA, 194 nt, synthetic construct
  source 1..194: mol_type = other RNA
gcagttttcctggattatgccgtttaagagcggggaaatccgcaagtttaaataaggctagtccgttatcagcgtgaaaacgcggcaccgagtcggtgctcatcataggaaacaccaaagatgatattttctttaatggtgccaggcataatccaggcgcggttctatctagttacgcgttaaaccaactagaa

SEQ ID NO: 2055 - RNA, 194 nt, synthetic construct
  source 1..194: mol_type = other RNA
gcagttttcctggattatgccgtttaagagcggggaaatccgcaagtttaaataaggctagtccgttatcagcgtgaaaacgcggcaccgagtcggtgcttcatcataggaaacaccaaagatgatattttctttaatggtgccaggcataatccagcgcggttctatctagttacgcgttaaaccaactagaa

SEQ ID NO: 2056 - RNA, 194 nt, synthetic construct
  source 1..194: mol_type = other RNA
gcagttttcctggattatgccgtttaagagcggggaaatccgcaagtttaaataaggctagtccgttatcagcgtgaaaacgcggcaccgagtcggtgcattcatcataggaaacaccaaagatgatattttctttaatggtgccaggcataatccacgcggttctatctagttacgcgttaaaccaactagaa

SEQ ID NO: 2057 - RNA, 195 nt, synthetic construct
  source 1..195: mol_type = other RNA
gtctgtatctatattcatcatgtttaagagcggggaaatccgcaagtttaaataaggctagtccgttatcagcgtgaaaacgcggcaccgagtcggtgcgcctggcaccattaaagaaaatatcatctttggtgtttcctatgatgaatatagatacacgcggttctatctagttacgcgttaaaccaactagaa

SEQ ID NO: 2058 - RNA, 195 nt, synthetic construct
  source 1..195: mol_type = other RNA
gtctgtatctatattcatcatgtttaagagcggggaaatccgcaagtttaaataaggctagtccgttatcagcgtgaaaacgcggcaccgagtcggtgctgcctggcaccattaaagaaaatatcatctttggtgtttcctatgatgaatatagataccgcggttctatctagttacgcgttaaaccaactagaa

SEQ ID NO: 2059 - RNA, 195 nt, synthetic construct
  source 1..195: mol_type = other RNA
gtctgtatctatattcatcatgtttaagagcggggaaatccgcaagtttaaataaggctagtccgttatcagcgtgaaaacgcggcaccgagtcggtgcatgcctggcaccattaaagaaaatatcatctttggtgtttcctatgatgaatatagatacgcggttctatctagttacgcgttaaaccaactagaa

SEQ ID NO: 2060 - RNA, 195 nt, synthetic construct
  source 1..195: mol_type = other RNA
gtctgtatctatattcatcatgtttaagagcggggaaatccgcaagtttaaataaggctagtccgttatcagcgtgaaaacgcggcaccgagtcggtgctatgcctggcaccattaaagaaaatatcatctttggtgtttcctatgatgaatatagatcgcggttctatctagttacgcgttaaaccaactagaa

SEQ ID NO: 2061 - RNA, 195 nt, synthetic construct
  source 1..195: mol_type = other RNA
gcagttttcctggattatgccgtttaagagcggggaaatccgcaagtttaaataaggctagtccgttatcagcgtgaaaacgcggcaccgagtcggtgccataggaaacaccaaagatgatattttctttaatggtgccaggcataatccaggaaaaccgcggttctatctagttacgcgttaaaccaactagaa

SEQ ID NO: 2062 - RNA, 195 nt, synthetic construct
  source 1..195: mol_type = other RNA
gcagttttcctggattatgccgtttaagagcggggaaatccgcaagtttaaataaggctagtccgttatcagcgtgaaaacgcggcaccgagtcggtgctcataggaaacaccaaagatgatattttctttaatggtgccaggcataatccaggaaaacgcggttctatctagttacgcgttaaaccaactagaa

SEQ ID NO: 2063 - RNA, 195 nt, synthetic construct
  source 1..195: mol_type = other RNA
gcagttttcctggattatgccgtttaagagcggggaaatccgcaagtttaaataaggctagtccgttatcagcgtgaaaacgcggcaccgagtcggtgcatcataggaaacaccaaagatgatattttctttaatggtgccaggcataatccaggaaacgcggttctatctagttacgcgttaaaccaactagaa

SEQ ID NO: 2064 - RNA, 195 nt, synthetic construct
  source 1..195: mol_type = other RNA
gcagttttcctggattatgccgtttaagagcggggaaatccgcaagtttaaataaggctagtccgttatcagcgtgaaaacgcggcaccgagtcggtgccatcataggaaacaccaaagatgatattttctttaatggtgccaggcataatccaggaacgcggttctatctagttacgcgttaaaccaactagaa

SEQ ID NO: 2065 - RNA, 195 nt, synthetic construct
  source 1..195: mol_type = other RNA
gcagttttcctggattatgccgtttaagagcggggaaatccgcaagtttaaataaggctagtccgttatcagcgtgaaaacgcggcaccgagtcggtgctcatcataggaaacaccaaagatgatattttctttaatggtgccaggcataatccaggacgcggttctatctagttacgcgttaaaccaactagaa

SEQ ID NO: 2066 - RNA, 195 nt, synthetic construct
  source 1..195: mol_type = other RNA
gcagttttcctggattatgccgtttaagagcggggaaatccgcaagtttaaataaggctagtccgttatcagcgtgaaaacgcggcaccgagtcggtgcttcatcataggaaacaccaaagatgatattttctttaatggtgccaggcataatccaggcgcggttctatctagttacgcgttaaaccaactagaa

SEQ ID NO: 2067 - RNA, 195 nt, synthetic construct
  source 1..195: mol_type = other RNA
gcagttttcctggattatgccgtttaagagcggggaaatccgcaagtttaaataaggctagtccgttatcagcgtgaaaacgcggcaccgagtcggtgcattcatcataggaaacaccaaagatgatattttctttaatggtgccaggcataatccagcgcggttctatctagttacgcgttaaaccaactagaa

SEQ ID NO: 2068 - RNA, 196 nt, synthetic construct
  source 1..196: mol_type = other RNA
gcagttttcctggattatgccgtttaagagcggggaaatccgcaagtttaaataaggctagtccgttatcagcgtgaaaacgcggcaccgagtcggtgccataactaacaccaaagatgatattttctttaatggtgccaggcataatccaggaagtctcgcggttctatctagttacgcgttaaaccaactagaa

SEQ ID NO: 2069 - RNA, 196 nt, synthetic construct
  source 1..196: mol_type = other RNA
gcagttttcctggattatgccgtttaagagcggggaaatccgcaagtttaaataaggctagtccgttatcagcgtgaaaacgcggcaccgagtcggtgccataagaaacaccaaagatgatattttctttaatggtgccaggcataatccaggaagtctcgcggttctatctagttacgcgttaaaccaactagaa

SEQ ID NO: 2070 - RNA, 196 nt, synthetic construct
  source 1..196: mol_type = other RNA
gcagttttcctggattatgccgtttaagagcggggaaatccgcaagtttaaataaggctagtccgttatcagcgtgaaaacgcggcaccgagtcggtgccatacgaaacaccaaagatgatattctctttaatggtgcccggcataatccaggaagtctcgcggttctatctagttacgcgttaaaccaactagaa

SEQ ID NO: 2071 - RNA, 196 nt, synthetic construct
  source 1..196: mol_type = other RNA
gcagttttcctggattatgccgtttaagagcggggaaatccgcaagtttaaataaggctagtccgttatcagcgtgaaaacgcggcaccgagtcggtgccatacgaaacaccaaagatgatattttctttaatggtgccaggcataatccaggaagtctcgcggttctatctagttacgcgttaaaccaactagaa

SEQ ID NO: 2072 - RNA, 196 nt, synthetic construct
  source 1..196: mol_type = other RNA
gcagttttcctggattatgccgtttaagagcggggaaatccgcaagtttaaataaggctagtccgttatcagcgtgaaaacgcggcaccgagtcggtgccatacgaaacaccaaagatgatattttctttaatggtgcccggcataatccaggaagtctcgcggttctatctagttacgcgttaaaccaactagaa

SEQ ID NO: 2073 - RNA, 196 nt, synthetic construct
  source 1..196: mol_type = other RNA
gcagttttcctggattatgccgtttaagagcggggaaatccgcaagtttaaataaggctagtccgttatcagcgtgaaaacgcggcaccgagtcggtgccatacgaaacaccaaagatgatgttctctttgatggtgccaggcataatccaggaagtcccgcggttctatctagttacgcgttaaaccaactagaa

SEQ ID NO: 2074 - RNA, 196 nt, synthetic construct
  source 1..196: mol_type = other RNA
gcagttttcctggattatgccgtttaagagcggggaaatccgcaagtttaaataaggctagtccgttatcagcgtgaaaacgcggcaccgagtcggtgccatagctaacaccaaagatgatattctctttaatggtgccaggcataatccaggaagtaccgcggttctatctagttacgcgttaaaccaactagaa

SEQ ID NO: 2075 - RNA, 196 nt, synthetic construct
  source 1..196: mol_type = other RNA
gcagttttcctggattatgccgtttaagagcggggaaatccgcaagtttaaataaggctagtccgttatcagcgtgaaaacgcggcaccgagtcggtgccatagctaacaccaaagatgatattttctttaatggtgccaggcataatccaggaagtaccgcggttctatctagttacgcgttaaaccaactagaa

SEQ ID NO: 2076 - RNA, 196 nt, synthetic construct
  source 1..196: mol_type = other RNA
gcagttttcctggattatgccgtttaagagcggggaaatccgcaagtttaaataaggctagtccgttatcagcgtgaaaacgcggcaccgagtcggtgccatagctaacaccaaagatgatgttctctttgatggtgccaggcataatccaggaagtaccgcggttctatctagttacgcgttaaaccaactagaa

SEQ ID NO: 2077 - RNA, 196 nt, synthetic construct
  source 1..196: mol_type = other RNA
gcagttttcctggattatgccgtttaagagcggggaaatccgcaagtttaaataaggctagtccgttatcagcgtgaaaacgcggcaccgagtcggtgccatagctaacaccaaagatgatgttctctttgatggtgcccggcataatccaggaagtatcgcggttctatctagttacgcgttaaaccaactagaa

SEQ ID NO: 2078 - RNA, 196 nt, synthetic construct
  source 1..196: mol_type = other RNA
gcagttttcctggattatgccgtttaagagcggggaaatccgcaagtttaaataaggctagtccgttatcagcgtgaaaacgcggcaccgagtcggtgccataggaaacaccaaagataatattttctttaatggtgccaggcataatccaggaagtctcgcggttctatctagttacgcgttaaaccaactagaa

SEQ ID NO: 2079 - RNA, 196 nt, synthetic construct
  source 1..196: mol_type = other RNA
gcagttttcctggattatgccgtttaagagcggggaaatccgcaagtttaaataaggctagtccgttatcagcgtgaaaacgcggcaccgagtcggtgccataggaaacaccaaagatgatattctctttaatggtgccaggcataatccaggaagtctcgcggttctatctagttacgcgttaaaccaactagaa

SEQ ID NO: 2080 - RNA, 196 nt, synthetic construct
  source 1..196: mol_type = other RNA
gcagttttcctggattatgccgtttaagagcggggaaatccgcaagtttaaataaggctagtccgttatcagcgtgaaaacgcggcaccgagtcggtgccataggaaacaccaaagatgatattttccttaatggtgccaggcataatccaggaagtaccgcggttctatctagttacgcgttaaaccaactagaa

SEQ ID NO: 2081 - RNA, 196 nt, synthetic construct
  source 1..196: mol_type = other RNA
gcagttttcctggattatgccgtttaagagcggggaaatccgcaagtttaaataaggctagtccgttatcagcgtgaaaacgcggcaccgagtcggtgccataggaaacaccaaagatgatattttctttaatagtgccaggcataatccaggaattttcgcggttctatctagttacgcgttaaaccaactagaa

SEQ ID NO: 2082 - RNA, 196 nt, synthetic construct
  source 1..196: mol_type = other RNA
gcagttttcctggattatgccgtttaagagcggggaaatccgcaagtttaaataaggctagtccgttatcagcgtgaaaacgcggcaccgagtcggtgccataggaaacaccaaagatgatattttctttaatcgtgccaggcataatccaggaagttccgcggttctatctagttacgcgttaaaccaactagaa

SEQ ID NO: 2083 - RNA, 196 nt, synthetic construct
  source 1..196: mol_type = other RNA
gcagttttcctggattatgccgtttaagagcggggaaatccgcaagtttaaataaggctagtccgttatcagcgtgaaaacgcggcaccgagtcggtgccataggaaacaccaaagatgatattttctttaatggtaccaggcataatccaggaagtctcgcggttctatctagttacgcgttaaaccaactagaa

SEQ ID NO: 2084 - RNA, 196 nt, synthetic construct
  source 1..196: mol_type = other RNA
gcagttttcctggattatgccgtttaagagcggggaaatccgcaagtttaaataaggctagtccgttatcagcgtgaaaacgcggcaccgagtcggtgccataggaaacaccaaagatgatattttctttaatggtcccaggcataatccaggaagtaccgcggttctatctagttacgcgttaaaccaactagaa

SEQ ID NO: 2085 - RNA, 196 nt, synthetic construct
  source 1..196: mol_type = other RNA
gcagttttcctggattatgccgtttaagagcggggaaatccgcaagtttaaataaggctagtccgttatcagcgtgaaaacgcggcaccgagtcggtgccataggaaacaccaaagatgatattttctttaatggtgccaggcataatccaggaagtctcgcggttctatctagttacgcgttaaaccaactagaa

SEQ ID NO: 2086 - RNA, 196 nt, synthetic construct
  source 1..196: mol_type = other RNA
gcagttttcctggattatgccgtttaagagcggggaaatccgcaagtttaaataaggctagtccgttatcagcgtgaaaacgcggcaccgagtcggtgccataggaaacaccaaagatgatattttctttaatggtgcccggcataatccaggaagtctcgcggttctatctagttacgcgttaaaccaactagaa

SEQ ID NO: 2087 - RNA, 196 nt, synthetic construct
  source 1..196: mol_type = other RNA
gcagttttcctggattatgccgtttaagagcggggaaatccgcaagtttaaataaggctagtccgttatcagcgtgaaaacgcggcaccgagtcggtgccataggaaacaccaaagatgatattttctttaatggtgccgggcataatccaggaagtctcgcggttctatctagttacgcgttaaaccaactagaa

SEQ ID NO: 2088 - RNA, 196 nt, synthetic construct
  source 1..196: mol_type = other RNA
gcagttttcctggattatgccgtttaagagcggggaaatccgcaagtttaaataaggctagtccgttatcagcgtgaaaacgcggcaccgagtcggtgccataggaaacaccaaagatgatattttctttaatggtgcctggcataatccaggaacgctcgcggttctatctagttacgcgttaaaccaactagaa

SEQ ID NO: 2089 - RNA, 196 nt, synthetic construct
  source 1..196: mol_type = other RNA
gcagttttcctggattatgccgtttaagagcggggaaatccgcaagtttaaataaggctagtccgttatcagcgtgaaaacgcggcaccgagtcggtgccataggaaacaccaaagatgatattttctttaatggttccaggcataatccaggaagtaccgcggttctatctagttacgcgttaaaccaactagaa

SEQ ID NO: 2090 - RNA, 196 nt, synthetic construct
  source 1..196: mol_type = other RNA
gcagttttcctggattatgccgtttaagagcggggaaatccgcaagtttaaataaggctagtccgttatcagcgtgaaaacgcggcaccgagtcggtgccataggaaacaccaaagatgatattttctttaattgtgccaggcataatccaggaattaccgcggttctatctagttacgcgttaaaccaactagaa

SEQ ID NO: 2091 - RNA, 196 nt, synthetic construct
  source 1..196: mol_type = other RNA
gcagttttcctggattatgccgtttaagagcggggaaatccgcaagtttaaataaggctagtccgttatcagcgtgaaaacgcggcaccgagtcggtgccataggaaacaccaaagatgatattttctttgatggtgccaggcataatccaggaagtaccgcggttctatctagttacgcgttaaaccaactagaa

SEQ ID NO: 2092 - RNA, 196 nt, synthetic construct
  source 1..196: mol_type = other RNA
gcagttttcctggattatgccgtttaagagcggggaaatccgcaagtttaaataaggctagtccgttatcagcgtgaaaacgcggcaccgagtcggtgccataggaaacaccaaagatgatattttcttttatggtgccaggcataatccaggaagtctcgcggttctatctagttacgcgttaaaccaactagaa

SEQ ID NO: 2093 - RNA, 196 nt, synthetic construct
  source 1..196: mol_type = other RNA
gcagttttcctggattatgccgtttaagagcggggaaatccgcaagtttaaataaggctagtccgttatcagcgtgaaaacgcggcaccgagtcggtgccataggaaacaccaaagatgatgttttctttaatggtgccaggcataatccaggaagtatcgcggttctatctagttacgcgttaaaccaactagaa

SEQ ID NO: 2094 - RNA, 196 nt, synthetic construct
  source 1..196: mol_type = other RNA
gcagttttcctggattatgccgtttaagagcggggaaatccgcaagtttaaataaggctagtccgttatcagcgtgaaaacgcggcaccgagtcggtgccataggaaacaccaaagattatattttctttaatggtgccaggcataatccaggaagtctcgcggttctatctagttacgcgttaaaccaactagaa

SEQ ID NO: 2095 - RNA, 196 nt, synthetic construct
  source 1..196: mol_type = other RNA
gcagttttcctggattatgccgtttaagagcggggaaatccgcaagtttaaataaggctagtccgttatcagcgtgaaaacgcggcaccgagtcggtgccataggaaacaccgaagatgatattttctttaatggtgccaggcataatccaggaatgttcgcggttctatctagttacgcgttaaaccaactagaa

SEQ ID NO: 2096 - RNA, 196 nt, synthetic construct
  source 1..196: mol_type = other RNA
gcagttttcctggattatgccgtttaagagcggggaaatccgcaagtttaaataaggctagtccgttatcagcgtgaaaacgcggcaccgagtcggtgccataggaaaccccaaagatgatattttctttaatggtgccaggcataatccaggaaggctcgcggttctatctagttacgcgttaaaccaactagaa

SEQ ID NO: 2097 - RNA, 196 nt, synthetic construct
  source 1..196: mol_type = other RNA
gcagttttcctggattatgccgtttaagagcggggaaatccgcaagtttaaataaggctagtccgttatcagcgtgaaaacgcggcaccgagtcggtgccataggaaacgccaaagatgatattttctttaatggtgccaggcataatccaggaatgttcgcggttctatctagttacgcgttaaaccaactagaa

SEQ ID NO: 2098 - RNA, 196 nt, synthetic construct
  source 1..196: mol_type = other RNA
gcagttttcctggattatgccgtttaagagcggggaaatccgcaagtttaaataaggctagtccgttatcagcgtgaaaacgcggcaccgagtcggtgccataggaaactccaaagatgatattttctttaatggtgccaggcataatccaggaagtcccgcggttctatctagttacgcgttaaaccaactagaa

SEQ ID NO: 2099 - RNA, 196 nt, synthetic construct
  source 1..196: mol_type = other RNA
gcagttttcctggattatgccgtttaagagcggggaaatccgcaagtttaaataaggctagtccgttatcagcgtgaaaacgcggcaccgagtcggtgccataggacacaccaaagatgatattttctttaatggtgccaggcataatccaggaatccacgcggttctatctagttacgcgttaaaccaactagaa

SEQ ID NO: 2100 - RNA, 196 nt, synthetic construct
  source 1..196: mol_type = other RNA
gcagttttcctggattatgccgtttaagagcggggaaatccgcaagtttaaataaggctagtccgttatcagcgtgaaaacgcggcaccgagtcggtgccataggagacaccaaagatgatattttctttaatggtgccaggcataatccaggaattttcgcggttctatctagttacgcgttaaaccaactagaa

SEQ ID NO: 2101 - RNA, 196 nt, synthetic construct
  source 1..196: mol_type = other RNA
gcagttttcctggattatgccgtttaagagcggggaaatccgcaagtttaaataaggctagtccgttatcagcgtgaaaacgcggcaccgagtcggtgccataggatacaccaaagatgatattttctttaatggtgccaggcataatccaggaatgttcgcggttctatctagttacgcgttaaaccaactagaa

SEQ ID NO: 2102 - RNA, 196 nt, synthetic construct
  source 1..196: mol_type = other RNA
gcagttttcctggattatgccgtttaagagcggggaaatccgcaagtttaaataaggctagtccgttatcagcgtgaaaacgcggcaccgagtcggtgccatatgaaacaccaaagatgatattttctttaatggtgccaggcataatccaggaagtaccgcggttctatctagttacgcgttaaaccaactagaa

SEQ ID NO: 2103 - RNA, 196 nt, synthetic construct
  source 1..196: mol_type = other RNA
gcagttttcctggattatgccgtttaagagcggggaaatccgcaagtttaaataaggctagtccgttatcagcgtgaaaacgcggcaccgagtcggtgccatatgaaacaccaaagatgatgttctctttgatggtgccaggcataatccaggaagtcccgcggttctatctagttacgcgttaaaccaactagaa

SEQ ID NO: 2104 - RNA, 196 nt, synthetic construct
  source 1..196: mol_type = other RNA
gcagttttcctggattatgccgtttaagagcggggaaatccgcaagtttaaataaggctagtccgttatcagcgtgaaaacgcggcaccgagtcggtgccgtaactgacgccaaagatgatattttctttaatggtgccaggcataatccaggaagtaccgcggttctatctagttacgcgttaaaccaactagaa

SEQ ID NO: 2105 - RNA, 196 nt, synthetic construct
  source 1..196: mol_type = other RNA
gcagttttcctggattatgccgtttaagagcggggaaatccgcaagtttaaataaggctagtccgttatcagcgtgaaaacgcggcaccgagtcggtgccgtaggaaacaccaaagatgatattttctttaatggtgccaggcataatccaggaatgttcgcggttctatctagttacgcgttaaaccaactagaa

SEQ ID NO: 2106 - RNA, 196 nt, synthetic construct
  source 1..196: mol_type = other RNA
gtctgtatctatattcatcatgtttaagagcggggaaatccgcaagtttaaataaggctagtccgttatcagcgtgaaaacgcggcaccgagtcggtgcgccaggaaccattaaagaaaatatcatctttggtgtttcctatgatgaatatagatgtcccgcggttctatctagttacgcgttaaaccaactagaa

SEQ ID NO: 2107 - RNA, 196 nt, synthetic construct
  source 1..196: mol_type = other RNA
gtctgtatctatattcatcatgtttaagagcggggaaatccgcaagtttaaataaggctagtccgttatcagcgtgaaaacgcggcaccgagtcggtgcgccaggcaccatcaaagaaaatatcatctttggtgtttcctatgatgaatatagatgatccgcggttctatctagttacgcgttaaaccaactagaa

SEQ ID NO: 2108 - RNA, 196 nt, synthetic construct
  source 1..196: mol_type = other RNA
gtctgtatctatattcatcatgtttaagagcggggaaatccgcaagtttaaataaggctagtccgttatcagcgtgaaaacgcggcaccgagtcggtgcgccaggcaccattaaagaaaatatcatctttggtgtctcctatgatgaatatagatgatccgcggttctatctagttacgcgttaaaccaactagaa

SEQ ID NO: 2109 - RNA, 196 nt, synthetic construct
  source 1..196: mol_type = other RNA
gtctgtatctatattcatcatgtttaagagcggggaaatccgcaagtttaaataaggctagtccgttatcagcgtgaaaacgcggcaccgagtcggtgcgccaggcaccattaaagaaaatatcatctttggtgtttcatatgatgaatatagatttcccgcggttctatctagttacgcgttaaaccaactagaa

SEQ ID NO: 2110 - RNA, 196 nt, synthetic construct
  source 1..196: mol_type = other RNA
gtctgtatctatattcatcatgtttaagagcggggaaatccgcaagtttaaataaggctagtccgttatcagcgtgaaaacgcggcaccgagtcggtgcgccaggcaccattaaagaaaatatcatctttggtgtttcctacgatgaatatagatttcccgcggttctatctagttacgcgttaaaccaactagaa

SEQ ID NO: 2111 - RNA, 196 nt, synthetic construct
  source 1..196: mol_type = other RNA
gtctgtatctatattcatcatgtttaagagcggggaaatccgcaagtttaaataaggctagtccgttatcagcgtgaaaacgcggcaccgagtcggtgcgccaggcaccattaaagaaaatatcatctttggtgtttcgtatgatgaatatagatttcccgcggttctatctagttacgcgttaaaccaactagaa

SEQ ID NO: 2112 - RNA, 196 nt, synthetic construct
  source 1..196: mol_type = other RNA
gtctgtatctatattcatcatgtttaagagcggggaaatccgcaagtttaaataaggctagtccgttatcagcgtgaaaacgcggcaccgagtcggtgcgccaggcaccattaaagaaaatatcatctttggtgtttcttatgatgaatatagattatccgcggttctatctagttacgcgttaaaccaactagaa

SEQ ID NO: 2113 - RNA, 196 nt, synthetic construct
  source 1..196: mol_type = other RNA
gtctgtatctatattcatcatgtttaagagcggggaaatccgcaagtttaaataaggctagtccgttatcagcgtgaaaacgcggcaccgagtcggtgcgccaggcaccattaaagagaatatcatctttggtgtttcctatgatgaatatagatgatccgcggttctatctagttacgcgttaaaccaactagaa

SEQ ID NO: 2114 - RNA, 196 nt, synthetic construct
  source 1..196: mol_type = other RNA
gtctgtatctatattcatcatgtttaagagcggggaaatccgcaagtttaaataaggctagtccgttatcagcgtgaaaacgcggcaccgagtcggtgcgccagggaccattaaagaaaatatcatctttggtgtttcctatgatgaatatagatgatccgcggttctatctagttacgcgttaaaccaactagaa

SEQ ID NO: 2115 - RNA, 196 nt, synthetic construct
  source 1..196: mol_type = other RNA
gtctgtatctatattcatcatgtttaagagcggggaaatccgcaagtttaaataaggctagtccgttatcagcgtgaaaacgcggcaccgagtcggtgcgccgggaaccattaaagaaaatatcatctttggtgtttcctatgatgaatatagattagccgcggttctatctagttacgcgttaaaccaactagaa

SEQ ID NO: 2116 - RNA, 196 nt, synthetic construct
  source 1..196: mol_type = other RNA
gtctgtatctatattcatcatgtttaagagcggggaaatccgcaagtttaaataaggctagtccgttatcagcgtgaaaacgcggcaccgagtcggtgcgccgggcaccatcaaagaaaatatcatctttggtgtttcctatgatgaatatagatcttacgcggttctatctagttacgcgttaaaccaactagaa

SEQ ID NO: 2117 - RNA, 196 nt, synthetic construct
  source 1..196: mol_type = other RNA
gtctgtatctatattcatcatgtttaagagcggggaaatccgcaagtttaaataaggctagtccgttatcagcgtgaaaacgcggcaccgagtcggtgcgccgggcaccattaaagaaaatatcatctttggtgtctcctatgatgaatatagattatccgcggttctatctagttacgcgttaaaccaactagaa

SEQ ID NO: 2118 - RNA, 196 nt, synthetic construct
  source 1..196: mol_type = other RNA
gtctgtatctatattcatcatgtttaagagcggggaaatccgcaagtttaaataaggctagtccgttatcagcgtgaaaacgcggcaccgagtcggtgcgccgggcaccattaaagaaaatatcatctttggtgtttcatatgatgaatatagatgaatcgcggttctatctagttacgcgttaaaccaactagaa

SEQ ID NO: 2119 - RNA, 196 nt, synthetic construct
  source 1..196: mol_type = other RNA
gtctgtatctatattcatcatgtttaagagcggggaaatccgcaagtttaaataaggctagtccgttatcagcgtgaaaacgcggcaccgagtcggtgcgccgggcaccattaaagaaaatatcatctttggtgtttcctacgatgaatatagattatacgcggttctatctagttacgcgttaaaccaactagaa

SEQ ID NO: 2120 - RNA, 196 nt, synthetic construct
  source 1..196: mol_type = other RNA
gtctgtatctatattcatcatgtttaagagcggggaaatccgcaagtttaaataaggctagtccgttatcagcgtgaaaacgcggcaccgagtcggtgcgccgggcaccattaaagaaaatatcatctttggtgtttcttatgatgaatatagatgattcgcggttctatctagttacgcgttaaaccaactagaa

SEQ ID NO: 2121 - RNA, 196 nt, synthetic construct
  source 1..196: mol_type = other RNA
gtctgtatctatattcatcatgtttaagagcggggaaatccgcaagtttaaataaggctagtccgttatcagcgtgaaaacgcggcaccgagtcggtgcgccgggcaccattaaagagaatatcatctttggtgtttcctatgatgaatatagatgacacgcggttctatctagttacgcgttaaaccaactagaa

SEQ ID NO: 2122 - RNA, 196 nt, synthetic construct
  source 1..196: mol_type = other RNA
gtctgtatctatattcatcatgtttaagagcggggaaatccgcaagtttaaataaggctagtccgttatcagcgtgaaaacgcggcaccgagtcggtgcgccggggaccattaaagaaaatatcatctttggtgtttcctatgatgaatatagatctatcgcggttctatctagttacgcgttaaaccaactagaa

SEQ ID NO: 2123 - RNA, 196 nt, synthetic construct
  source 1..196: mol_type = other RNA
gtctgtatctatattcatcatgtttaagagcggggaaatccgcaagtttaaataaggctagtccgttatcagcgtgaaaacgcggcaccgagtcggtgcgcctggaaccatcaaagaaaatatcatctttggtgtttcctatgatgaatatagatttcccgcggttctatctagttacgcgttaaaccaactagaa

SEQ ID NO: 2124 - RNA, 196 nt, synthetic construct
  source 1..196: mol_type = other RNA
gtctgtatctatattcatcatgtttaagagcggggaaatccgcaagtttaaataaggctagtccgttatcagcgtgaaaacgcggcaccgagtcggtgcgcctggaaccattaaagaaaatatcatctttggtgtctcctatgatgaatatagatgtcccgcggttctatctagttacgcgttaaaccaactagaa

SEQ ID NO: 2125 - RNA, 196 nt, synthetic construct
  source 1..196: mol_type = other RNA
gtctgtatctatattcatcatgtttaagagcggggaaatccgcaagtttaaataaggctagtccgttatcagcgtgaaaacgcggcaccgagtcggtgcgcctggaaccattaaagaaaatatcatctttggtgtttcatatgatgaatatagatgtcccgcggttctatctagttacgcgttaaaccaactagaa

SEQ ID NO: 2126 - RNA, 196 nt, synthetic construct
  source 1..196: mol_type = other RNA
gtctgtatctatattcatcatgtttaagagcggggaaatccgcaagtttaaataaggctagtccgttatcagcgtgaaaacgcggcaccgagtcggtgcgcctggaaccattaaagaaaatatcatctttggtgtttcctacgatgaatatagatgtcccgcggttctatctagttacgcgttaaaccaactagaa

SEQ ID NO: 2127 - RNA, 196 nt, synthetic construct
  source 1..196: mol_type = other RNA
gtctgtatctatattcatcatgtttaagagcggggaaatccgcaagtttaaataaggctagtccgttatcagcgtgaaaacgcggcaccgagtcggtgcgcctggaaccattaaagaaaatatcatctttggtgtttcgtatgatgaatatagattgctcgcggttctatctagttacgcgttaaaccaactagaa

SEQ ID NO: 2128 - RNA, 196 nt, synthetic construct
  source 1..196: mol_type = other RNA
gtctgtatctatattcatcatgtttaagagcggggaaatccgcaagtttaaataaggctagtccgttatcagcgtgaaaacgcggcaccgagtcggtgcgcctggaaccattaaagaaaatatcatctttggtgtttcttatgatgaatatagatgacccgcggttctatctagttacgcgttaaaccaactagaa

SEQ ID NO: 2129 - RNA, 196 nt, synthetic construct
  source 1..196: mol_type = other RNA
gtctgtatctatattcatcatgtttaagagcggggaaatccgcaagtttaaataaggctagtccgttatcagcgtgaaaacgcggcaccgagtcggtgcgcctggaaccattaaagagaatatcatctttggtgtttcctatgatgaatatagatgtcccgcggttctatctagttacgcgttaaaccaactagaa

SEQ ID NO: 2130 - RNA, 196 nt, synthetic construct
  source 1..196: mol_type = other RNA
gtctgtatctatattcatcatgtttaagagcggggaaatccgcaagtttaaataaggctagtccgttatcagcgtgaaaacgcggcaccgagtcggtgcgcctggcaccatcaaagaaaatatcatctttggtgtctcctatgatgaatatagatgtatcgcggttctatctagttacgcgttaaaccaactagaa

SEQ ID NO: 2131 - RNA, 196 nt, synthetic construct
  source 1..196: mol_type = other RNA
gtctgtatctatattcatcatgtttaagagcggggaaatccgcaagtttaaataaggctagtccgttatcagcgtgaaaacgcggcaccgagtcggtgcgcctggcaccatcaaagaaaatatcatctttggtgtttcatatgatgaatatagatgactcgcggttctatctagttacgcgttaaaccaactagaa

SEQ ID NO: 2132 - RNA, 196 nt, synthetic construct
  source 1..196: mol_type = other RNA
gtctgtatctatattcatcatgtttaagagcggggaaatccgcaagtttaaataaggctagtccgttatcagcgtgaaaacgcggcaccgagtcggtgcgcctggcaccatcaaagaaaatatcatctttggtgtttcctacgatgaatatagatttcccgcggttctatctagttacgcgttaaaccaactagaa

SEQ ID NO: 2133 - RNA, 196 nt, synthetic construct
  source 1..196: mol_type = other RNA
gtctgtatctatattcatcatgtttaagagcggggaaatccgcaagtttaaataaggctagtccgttatcagcgtgaaaacgcggcaccgagtcggtgcgcctggcaccatcaaagaaaatatcatctttggtgtttcgtatgatgaatatagattactcgcggttctatctagttacgcgttaaaccaactagaa

SEQ ID NO: 2134 - RNA, 196 nt, synthetic construct
  source 1..196: mol_type = other RNA
gtctgtatctatattcatcatgtttaagagcggggaaatccgcaagtttaaataaggctagtccgttatcagcgtgaaaacgcggcaccgagtcggtgcgcctggcaccatcaaagaaaatatcatctttggtgtttcttatgatgaatatagatcactcgcggttctatctagttacgcgttaaaccaactagaa

SEQ ID NO: 2135 - RNA, 196 nt, synthetic construct
  source 1..196: mol_type = other RNA
gtctgtatctatattcatcatgtttaagagcggggaaatccgcaagtttaaataaggctagtccgttatcagcgtgaaaacgcggcaccgagtcggtgcgcctggcaccatcaaagagaatatcatctttggtgtttcctatgatgaatatagatgattcgcggttctatctagttacgcgttaaaccaactagaa

SEQ ID NO: 2136 - RNA, 196 nt, synthetic construct
  source 1..196: mol_type = other RNA
gtctgtatctatattcatcatgtttaagagcggggaaatccgcaagtttaaataaggctagtccgttatcagcgtgaaaacgcggcaccgagtcggtgcgcctggcaccattaaagaaaatatcatctttggtgtctcatatgatgaatatagatttcccgcggttctatctagttacgcgttaaaccaactagaa

SEQ ID NO: 2137 - RNA, 196 nt, synthetic construct
  source 1..196: mol_type = other RNA
gtctgtatctatattcatcatgtttaagagcggggaaatccgcaagtttaaataaggctagtccgttatcagcgtgaaaacgcggcaccgagtcggtgcgcctggcaccattaaagaaaatatcatctttggtgtctcctacgatgaatatagatgtcccgcggttctatctagttacgcgttaaaccaactagaa

SEQ ID NO: 2138 - RNA, 196 nt, synthetic construct
  source 1..196: mol_type = other RNA
gtctgtatctatattcatcatgtttaagagcggggaaatccgcaagtttaaataaggctagtccgttatcagcgtgaaaacgcggcaccgagtcggtgcgcctggcaccattaaagaaaatatcatctttggtgtctcgtatgatgaatatagatttcccgcggttctatctagttacgcgttaaaccaactagaa

SEQ ID NO: 2139 - RNA, 196 nt, synthetic construct
  source 1..196: mol_type = other RNA
gtctgtatctatattcatcatgtttaagagcggggaaatccgcaagtttaaataaggctagtccgttatcagcgtgaaaacgcggcaccgagtcggtgcgcctggcaccattaaagaaaatatcatctttggtgtctcttatgatgaatatagattgtccgcggttctatctagttacgcgttaaaccaactagaa

SEQ ID NO: 2140 - RNA, 196 nt, synthetic construct
  source 1..196: mol_type = other RNA
gtctgtatctatattcatcatgtttaagagcggggaaatccgcaagtttaaataaggctagtccgttatcagcgtgaaaacgcggcaccgagtcggtgcgcctggcaccattaaagaaaatatcatctttggtgtttcatacgatgaatatagatgatccgcggttctatctagttacgcgttaaaccaactagaa

SEQ ID NO: 2141 - RNA, 196 nt, synthetic construct
  source 1..196: mol_type = other RNA
gtctgtatctatattcatcatgtttaagagcggggaaatccgcaagtttaaataaggctagtccgttatcagcgtgaaaacgcggcaccgagtcggtgcgcctggcaccattaaagaaaatatcatctttggtgtttcgtacgatgaatatagatttcccgcggttctatctagttacgcgttaaaccaactagaa

SEQ ID NO: 2142 - RNA, 196 nt, synthetic construct
  source 1..196: mol_type = other RNA
gtctgtatctatattcatcatgtttaagagcggggaaatccgcaagtttaaataaggctagtccgttatcagcgtgaaaacgcggcaccgagtcggtgcgcctggcaccattaaagaaaatatcatctttggtgtttcttacgatgaatatagatttcccgcggttctatctagttacgcgttaaaccaactagaa

SEQ ID NO: 2143 - RNA, 196 nt, synthetic construct
  source 1..196: mol_type = other RNA
gtctgtatctatattcatcatgtttaagagcggggaaatccgcaagtttaaataaggctagtccgttatcagcgtgaaaacgcggcaccgagtcggtgcgcctggcaccattaaagagaatatcatctttggtgtctcctatgatgaatatagattgtccgcggttctatctagttacgcgttaaaccaactagaa

SEQ ID NO: 2144 - RNA, 196 nt, synthetic construct
  source 1..196: mol_type = other RNA
gtctgtatctatattcatcatgtttaagagcggggaaatccgcaagtttaaataaggctagtccgttatcagcgtgaaaacgcggcaccgagtcggtgcgcctggcaccattaaagagaatatcatctttggtgtttcatatgatgaatatagatgtatcgcggttctatctagttacgcgttaaaccaactagaa

SEQ ID NO: 2145 - RNA, 196 nt, synthetic construct
  source 1..196: mol_type = other RNA
gtctgtatctatattcatcatgtttaagagcggggaaatccgcaagtttaaataaggctagtccgttatcagcgtgaaaacgcggcaccgagtcggtgcgcctggcaccattaaagagaatatcatctttggtgtttcctacgatgaatatagatgatccgcggttctatctagttacgcgttaaaccaactagaa

SEQ ID NO: 2146 - RNA, 196 nt, synthetic construct
  source 1..196: mol_type = other RNA
gtctgtatctatattcatcatgtttaagagcggggaaatccgcaagtttaaataaggctagtccgttatcagcgtgaaaacgcggcaccgagtcggtgcgcctggcaccattaaagagaatatcatctttggtgtttcgtatgatgaatatagatttcccgcggttctatctagttacgcgttaaaccaactagaa

SEQ ID NO: 2147 - RNA, 196 nt, synthetic construct
  source 1..196: mol_type = other RNA
gtctgtatctatattcatcatgtttaagagcggggaaatccgcaagtttaaataaggctagtccgttatcagcgtgaaaacgcggcaccgagtcggtgcgcctggcaccattaaagagaatatcatctttggtgtttcttatgatgaatatagatcactcgcggttctatctagttacgcgttaaaccaactagaa

SEQ ID NO: 2148 - RNA, 196 nt, synthetic construct
  source 1..196: mol_type = other RNA
gtctgtatctatattcatcatgtttaagagcggggaaatccgcaagtttaaataaggctagtccgttatcagcgtgaaaacgcggcaccgagtcggtgcgcctgggaccatcaaagaaaatatcatctttggtgtttcctatgatgaatatagatctaccgcggttctatctagttacgcgttaaaccaactagaa

SEQ ID NO: 2149 - RNA, 196 nt, synthetic construct
  source 1..196: mol_type = other RNA
gtctgtatctatattcatcatgtttaagagcggggaaatccgcaagtttaaataaggctagtccgttatcagcgtgaaaacgcggcaccgagtcggtgcgcctgggaccattaaagaaaatatcatctttggtgtctcctatgatgaatatagattatccgcggttctatctagttacgcgttaaaccaactagaa

SEQ ID NO: 2150 - RNA, 196 nt, synthetic construct
  source 1..196: mol_type = other RNA
gtctgtatctatattcatcatgtttaagagcggggaaatccgcaagtttaaataaggctagtccgttatcagcgtgaaaacgcggcaccgagtcggtgcgcctgggaccattaaagaaaatatcatctttggtgtttcatatgatgaatatagattaatcgcggttctatctagttacgcgttaaaccaactagaa

SEQ ID NO: 2151 - RNA, 196 nt, synthetic construct
  source 1..196: mol_type = other RNA
gtctgtatctatattcatcatgtttaagagcggggaaatccgcaagtttaaataaggctagtccgttatcagcgtgaaaacgcggcaccgagtcggtgcgcctgggaccattaaagaaaatatcatctttggtgtttcctacgatgaatatagatgatccgcggttctatctagttacgcgttaaaccaactagaa

SEQ ID NO: 2152 - RNA, 196 nt, synthetic construct
  source 1..196: mol_type = other RNA
gtctgtatctatattcatcatgtttaagagcggggaaatccgcaagtttaaataaggctagtccgttatcagcgtgaaaacgcggcaccgagtcggtgcgcctgggaccattaaagaaaatatcatctttggtgtttcgtatgatgaatatagattgctcgcggttctatctagttacgcgttaaaccaactagaa

SEQ ID NO: 2153 - RNA, 196 nt, synthetic construct
  source 1..196: mol_type = other RNA
gtctgtatctatattcatcatgtttaagagcggggaaatccgcaagtttaaataaggctagtccgttatcagcgtgaaaacgcggcaccgagtcggtgcgcctgggaccattaaagaaaatatcatctttggtgtttcttatgatgaatatagatgactcgcggttctatctagttacgcgttaaaccaactagaa

SEQ ID NO: 2154 - RNA, 196 nt, synthetic construct
  source 1..196: mol_type = other RNA
gtctgtatctatattcatcatgtttaagagcggggaaatccgcaagtttaaataaggctagtccgttatcagcgtgaaaacgcggcaccgagtcggtgcgcctgggaccattaaagagaatatcatctttggtgtttcctatgatgaatatagatgtaccgcggttctatctagttacgcgttaaaccaactagaa

SEQ ID NO: 2155 - RNA, 196 nt, synthetic construct
  source 1..196: mol_type = other RNA
gtctgtatctatattcatcatgtttaagagcggggaaatccgcaagtttaaataaggctagtccgttatcagcgtgaaaacgcggcaccgagtcggtgcgccaggaaccatcaaagagaatatcatctttggtgtctcatacgatgaatatagattaaccgcggttctatctagttacgcgttaaaccaactagaa

SEQ ID NO: 2156 - RNA, 196 nt, synthetic construct
  source 1..196: mol_type = other RNA
gtctgtatctatattcatcatgtttaagagcggggaaatccgcaagtttaaataaggctagtccgttatcagcgtgaaaacgcggcaccgagtcggtgcgccaggaaccatcaaagagaatatcatctttggtgtctcgtacgatgaatatagattaaccgcggttctatctagttacgcgttaaaccaactagaa

SEQ ID NO: 2157 - RNA, 196 nt, synthetic construct
  source 1..196: mol_type = other RNA
gtctgtatctatattcatcatgtttaagagcggggaaatccgcaagtttaaataaggctagtccgttatcagcgtgaaaacgcggcaccgagtcggtgcgccaggaaccatcaaagagaatatcatctttggtgtctcttacgatgaatatagattagccgcggttctatctagttacgcgttaaaccaactagaa

SEQ ID NO: 2158 - RNA, 196 nt, synthetic construct
  source 1..196: mol_type = other RNA
gtctgtatctatattcatcatgtttaagagcggggaaatccgcaagtttaaataaggctagtccgttatcagcgtgaaaacgcggcaccgagtcggtgcgccagggaccatcaaagagaatatcatctttggtgtctcatacgatgaatatagatgatccgcggttctatctagttacgcgttaaaccaactagaa

SEQ ID NO: 2159 - RNA, 196 nt, synthetic construct
  source 1..196: mol_type = other RNA
gtctgtatctatattcatcatgtttaagagcggggaaatccgcaagtttaaataaggctagtccgttatcagcgtgaaaacgcggcaccgagtcggtgcgccagggaccatcaaagagaatatcatctttggtgtctcgtacgatgaatatagatgatccgcggttctatctagttacgcgttaaaccaactagaa

SEQ ID NO: 2160 - RNA, 196 nt, synthetic construct
  source 1..196: mol_type = other RNA
gtctgtatctatattcatcatgtttaagagcggggaaatccgcaagtttaaataaggctagtccgttatcagcgtgaaaacgcggcaccgagtcggtgcgccagggaccatcaaagagaatatcatctttggtgtctcttacgatgaatatagatttgccgcggttctatctagttacgcgttaaaccaactagaa

SEQ ID NO: 2161 - RNA, 196 nt, synthetic construct
  source 1..196: mol_type = other RNA
gtctgtatctatattcatcatgtttaagagcggggaaatccgcaagtttaaataaggctagtccgttatcagcgtgaaaacgcggcaccgagtcggtgcgccgggaaccatcaaagagaatatcatctttggtgtctcatacgatgaatatagattatacgcggttctatctagttacgcgttaaaccaactagaa

SEQ ID NO: 2162 - RNA, 196 nt, synthetic construct
  source 1..196: mol_type = other RNA
gtctgtatctatattcatcatgtttaagagcggggaaatccgcaagtttaaataaggctagtccgttatcagcgtgaaaacgcggcaccgagtcggtgcgccgggaaccatcaaagagaatatcatctttggtgtctcgtacgatgaatatagattagccgcggttctatctagttacgcgttaaaccaactagaa

SEQ ID NO: 2163 - RNA, 196 nt, synthetic construct
  source 1..196: mol_type = other RNA
gtctgtatctatattcatcatgtttaagagcggggaaatccgcaagtttaaataaggctagtccgttatcagcgtgaaaacgcggcaccgagtcggtgcgccgggaaccatcaaagagaatatcatctttggtgtctcttacgatgaatatagattacacgcggttctatctagttacgcgttaaaccaactagaa

SEQ ID NO: 2164 - RNA, 196 nt, synthetic construct
  source 1..196: mol_type = other RNA
gtctgtatctatattcatcatgtttaagagcggggaaatccgcaagtttaaataaggctagtccgttatcagcgtgaaaacgcggcaccgagtcggtgcgccggggaccatcaaagagaatatcatctttggtgtctcatacgatgaatatagatgactcgcggttctatctagttacgcgttaaaccaactagaa

SEQ ID NO: 2165 - RNA, 196 nt, synthetic construct
  source 1..196: mol_type = other RNA
gtctgtatctatattcatcatgtttaagagcggggaaatccgcaagtttaaataaggctagtccgttatcagcgtgaaaacgcggcaccgagtcggtgcgccggggaccatcaaagagaatatcatctttggtgtctcgtacgatgaatatagatgactcgcggttctatctagttacgcgttaaaccaactagaa

SEQ ID NO: 2166 - RNA, 196 nt, synthetic construct
  source 1..196: mol_type = other RNA
gtctgtatctatattcatcatgtttaagagcggggaaatccgcaagtttaaataaggctagtccgttatcagcgtgaaaacgcggcaccgagtcggtgcgccggggaccatcaaagagaatatcatctttggtgtctcttacgatgaatatagattatacgcggttctatctagttacgcgttaaaccaactagaa

SEQ ID NO: 2167 - RNA, 196 nt, synthetic construct
  source 1..196: mol_type = other RNA
gtctgtatctatattcatcatgtttaagagcggggaaatccgcaagtttaaataaggctagtccgttatcagcgtgaaaacgcggcaccgagtcggtgcgcctggcaccatcaaagaaaatatcatctttggtgtctcatacgatgaatatagatttcccgcggttctatctagttacgcgttaaaccaactagaa

SEQ ID NO: 2168 - RNA, 196 nt, synthetic construct
  source 1..196: mol_type = other RNA
gtctgtatctatattcatcatgtttaagagcggggaaatccgcaagtttaaataaggctagtccgttatcagcgtgaaaacgcggcaccgagtcggtgcgcctggcaccatcaaagaaaatatcatctttggtgtctcatatgatgaatatagatgactcgcggttctatctagttacgcgttaaaccaactagaa

SEQ ID NO: 2169 - RNA, 196 nt, synthetic construct
  source 1..196: mol_type = other RNA
gtctgtatctatattcatcatgtttaagagcggggaaatccgcaagtttaaataaggctagtccgttatcagcgtgaaaacgcggcaccgagtcggtgcgcctggcaccatcaaagaaaatatcatctttggtgtctcctacgatgaatatagatttcccgcggttctatctagttacgcgttaaaccaactagaa

SEQ ID NO: 2170 - RNA, 196 nt, synthetic construct
  source 1..196: mol_type = other RNA
gtctgtatctatattcatcatgtttaagagcggggaaatccgcaagtttaaataaggctagtccgttatcagcgtgaaaacgcggcaccgagtcggtgcgcctggcaccatcaaagaaaatatcatctttggtgtctcgtacgatgaatatagatttcccgcggttctatctagttacgcgttaaaccaactagaa

SEQ ID NO: 2171 - RNA, 196 nt, synthetic construct
  source 1..196: mol_type = other RNA
gtctgtatctatattcatcatgtttaagagcggggaaatccgcaagtttaaataaggctagtccgttatcagcgtgaaaacgcggcaccgagtcggtgcgcctggcaccatcaaagaaaatatcatctttggtgtctcgtatgatgaatatagatgatccgcggttctatctagttacgcgttaaaccaactagaa

SEQ ID NO: 2172 - RNA, 196 nt, synthetic construct
  source 1..196: mol_type = other RNA
gtctgtatctatattcatcatgtttaagagcggggaaatccgcaagtttaaataaggctagtccgttatcagcgtgaaaacgcggcaccgagtcggtgcgcctggcaccatcaaagaaaatatcatctttggtgtctcttacgatgaatatagatttcccgcggttctatctagttacgcgttaaaccaactagaa

SEQ ID NO: 2173 - RNA, 196 nt, synthetic construct
  source 1..196: mol_type = other RNA
gtctgtatctatattcatcatgtttaagagcggggaaatccgcaagtttaaataaggctagtccgttatcagcgtgaaaacgcggcaccgagtcggtgcgcctggcaccatcaaagaaaatatcatctttggtgtctcttatgatgaatatagatgtatcgcggttctatctagttacgcgttaaaccaactagaa

SEQ ID NO: 2174 - RNA, 196 nt, synthetic construct
  source 1..196: mol_type = other RNA
gtctgtatctatattcatcatgtttaagagcggggaaatccgcaagtttaaataaggctagtccgttatcagcgtgaaaacgcggcaccgagtcggtgcgcctggcaccatcaaagaaaatatcatctttggtgtttcatacgatgaatatagatgactcgcggttctatctagttacgcgttaaaccaactagaa

SEQ ID NO: 2175 - RNA, 196 nt, synthetic construct
  source 1..196: mol_type = other RNA
gtctgtatctatattcatcatgtttaagagcggggaaatccgcaagtttaaataaggctagtccgttatcagcgtgaaaacgcggcaccgagtcggtgcgcctggcaccatcaaagaaaatatcatctttggtgtttcgtacgatgaatatagattactcgcggttctatctagttacgcgttaaaccaactagaa

SEQ ID NO: 2176 - RNA, 196 nt, synthetic construct
  source 1..196: mol_type = other RNA
gtctgtatctatattcatcatgtttaagagcggggaaatccgcaagtttaaataaggctagtccgttatcagcgtgaaaacgcggcaccgagtcggtgcgcctggcaccatcaaagaaaatatcatctttggtgtttcttacgatgaatatagatgactcgcggttctatctagttacgcgttaaaccaactagaa

SEQ ID NO: 2177 - RNA, 196 nt, synthetic construct
  source 1..196: mol_type = other RNA
gtctgtatctatattcatcatgtttaagagcggggaaatccgcaagtttaaataaggctagtccgttatcagcgtgaaaacgcggcaccgagtcggtgcgcctggcaccattaaagaaaatatcatctttggtgtctcatacgatgaatatagatgtcccgcggttctatctagttacgcgttaaaccaactagaa

SEQ ID NO: 2178 - RNA, 196 nt, synthetic construct
  source 1..196: mol_type = other RNA
gtctgtatctatattcatcatgtttaagagcggggaaatccgcaagtttaaataaggctagtccgttatcagcgtgaaaacgcggcaccgagtcggtgcgcctggcaccattaaagaaaatatcatctttggtgtctcgtacgatgaatatagatttcccgcggttctatctagttacgcgttaaaccaactagaa

SEQ ID NO: 2179 - RNA, 196 nt, synthetic construct
  source 1..196: mol_type = other RNA
gtctgtatctatattcatcatgtttaagagcggggaaatccgcaagtttaaataaggctagtccgttatcagcgtgaaaacgcggcaccgagtcggtgcgcctggcaccattaaagaaaatatcatctttggtgtctcttacgatgaatatagatttcccgcggttctatctagttacgcgttaaaccaactagaa

SEQ ID NO: 2180 - RNA, 196 nt, synthetic construct
  source 1..196: mol_type = other RNA
gtctgtatctatattcatcatgtttaagagcggggaaatccgcaagtttaaataaggctagtccgttatcagcgtgaaaacgcggcaccgagtcggtgcgcctgggaccatcaaagaaaatatcatctttggtgtctcatacgatgaatatagatgatccgcggttctatctagttacgcgttaaaccaactagaa

SEQ ID NO: 2181 - RNA, 196 nt, synthetic construct
  source 1..196: mol_type = other RNA
gtctgtatctatattcatcatgtttaagagcggggaaatccgcaagtttaaataaggctagtccgttatcagcgtgaaaacgcggcaccgagtcggtgcgcctgggaccatcaaagaaaatatcatctttggtgtctcatatgatgaatatagatgatccgcggttctatctagttacgcgttaaaccaactagaa

SEQ ID NO: 2182 - RNA, 196 nt, synthetic construct
  source 1..196: mol_type = other RNA
gtctgtatctatattcatcatgtttaagagcggggaaatccgcaagtttaaataaggctagtccgttatcagcgtgaaaacgcggcaccgagtcggtgcgcctgggaccatcaaagaaaatatcatctttggtgtctcctacgatgaatatagatgtaccgcggttctatctagttacgcgttaaaccaactagaa

SEQ ID NO: 2183 - RNA, 196 nt, synthetic construct
  source 1..196: mol_type = other RNA
gtctgtatctatattcatcatgtttaagagcggggaaatccgcaagtttaaataaggctagtccgttatcagcgtgaaaacgcggcaccgagtcggtgcgcctgggaccatcaaagaaaatatcatctttggtgtctcctatgatgaatatagatgtaccgcggttctatctagttacgcgttaaaccaactagaa

SEQ ID NO: 2184 - RNA, 196 nt, synthetic construct
  source 1..196: mol_type = other RNA
gtctgtatctatattcatcatgtttaagagcggggaaatccgcaagtttaaataaggctagtccgttatcagcgtgaaaacgcggcaccgagtcggtgcgcctgggaccatcaaagaaaatatcatctttggtgtctcgtacgatgaatatagatgatccgcggttctatctagttacgcgttaaaccaactagaa

SEQ ID NO: 2185 - RNA, 196 nt, synthetic construct
  source 1..196: mol_type = other RNA
gtctgtatctatattcatcatgtttaagagcggggaaatccgcaagtttaaataaggctagtccgttatcagcgtgaaaacgcggcaccgagtcggtgcgcctgggaccatcaaagaaaatatcatctttggtgtctcgtatgatgaatatagattatccgcggttctatctagttacgcgttaaaccaactagaa

SEQ ID NO: 2186 - RNA, 196 nt, synthetic construct
  source 1..196: mol_type = other RNA
gtctgtatctatattcatcatgtttaagagcggggaaatccgcaagtttaaataaggctagtccgttatcagcgtgaaaacgcggcaccgagtcggtgcgcctgggaccatcaaagaaaatatcatctttggtgtctcttacgatgaatatagatgatccgcggttctatctagttacgcgttaaaccaactagaa

SEQ ID NO: 2187 - RNA, 196 nt, synthetic construct
  source 1..196: mol_type = other RNA
gtctgtatctatattcatcatgtttaagagcggggaaatccgcaagtttaaataaggctagtccgttatcagcgtgaaaacgcggcaccgagtcggtgcgcctgggaccatcaaagaaaatatcatctttggtgtctcttatgatgaatatagatgatccgcggttctatctagttacgcgttaaaccaactagaa

SEQ ID NO: 2188 - RNA, 196 nt, synthetic construct
  source 1..196: mol_type = other RNA
gtctgtatctatattcatcatgtttaagagcggggaaatccgcaagtttaaataaggctagtccgttatcagcgtgaaaacgcggcaccgagtcggtgcgcctgggaccatcaaagaaaatatcatctttggtgtttcatacgatgaatatagatcaaccgcggttctatctagttacgcgttaaaccaactagaa

SEQ ID NO: 2189 - RNA, 196 nt, synthetic construct
  source 1..196: mol_type = other RNA
gtctgtatctatattcatcatgtttaagagcggggaaatccgcaagtttaaataaggctagtccgttatcagcgtgaaaacgcggcaccgagtcggtgcgcctgggaccatcaaagaaaatatcatctttggtgtttcatatgatgaatatagatctaccgcggttctatctagttacgcgttaaaccaactagaa

SEQ ID NO: 2190 - RNA, 196 nt, synthetic construct
  source 1..196: mol_type = other RNA
gtctgtatctatattcatcatgtttaagagcggggaaatccgcaagtttaaataaggctagtccgttatcagcgtgaaaacgcggcaccgagtcggtgcgcctgggaccatcaaagaaaatatcatctttggtgtttcctacgatgaatatagatgatccgcggttctatctagttacgcgttaaaccaactagaa

SEQ ID NO: 2191 - RNA, 196 nt, synthetic construct
  source 1..196: mol_type = other RNA
gtctgtatctatattcatcatgtttaagagcggggaaatccgcaagtttaaataaggctagtccgttatcagcgtgaaaacgcggcaccgagtcggtgcgcctgggaccatcaaagaaaatatcatctttggtgtttcgtacgatgaatatagattactcgcggttctatctagttacgcgttaaaccaactagaa

SEQ ID NO: 2192 - RNA, 196 nt, synthetic construct
  source 1..196: mol_type = other RNA
gtctgtatctatattcatcatgtttaagagcggggaaatccgcaagtttaaataaggctagtccgttatcagcgtgaaaacgcggcaccgagtcggtgcgcctgggaccatcaaagaaaatatcatctttggtgtttcgtatgatgaatatagatgtatcgcggttctatctagttacgcgttaaaccaactagaa

SEQ ID NO: 2193 - RNA, 196 nt, synthetic construct
  source 1..196: mol_type = other RNA
gtctgtatctatattcatcatgtttaagagcggggaaatccgcaagtttaaataaggctagtccgttatcagcgtgaaaacgcggcaccgagtcggtgcgcctgggaccatcaaagaaaatatcatctttggtgtttcttacgatgaatatagattagccgcggttctatctagttacgcgttaaaccaactagaa

SEQ ID NO: 2194 - RNA, 196 nt, synthetic construct
  source 1..196: mol_type = other RNA
gtctgtatctatattcatcatgtttaagagcggggaaatccgcaagtttaaataaggctagtccgttatcagcgtgaaaacgcggcaccgagtcggtgcgcctgggaccatcaaagaaaatatcatctttggtgtttcttatgatgaatatagattactcgcggttctatctagttacgcgttaaaccaactagaa

SEQ ID NO: 2195 - RNA, 196 nt, synthetic construct
  source 1..196: mol_type = other RNA
gtctgtatctatattcatcatgtttaagagcggggaaatccgcaagtttaaataaggctagtccgttatcagcgtgaaaacgcggcaccgagtcggtgcgcctgggaccattaaagaaaatatcatctttggtgtctcatacgatgaatatagatgatccgcggttctatctagttacgcgttaaaccaactagaa

SEQ ID NO: 2196 - RNA, 196 nt, synthetic construct
  source 1..196: mol_type = other RNA
gtctgtatctatattcatcatgtttaagagcggggaaatccgcaagtttaaataaggctagtccgttatcagcgtgaaaacgcggcaccgagtcggtgcgcctgggaccattaaagaaaatatcatctttggtgtctcatatgatgaatatagatgatccgcggttctatctagttacgcgttaaaccaactagaa

SEQ ID NO: 2197 - RNA, 196 nt, synthetic construct
  source 1..196: mol_type = other RNA
gtctgtatctatattcatcatgtttaagagcggggaaatccgcaagtttaaataaggctagtccgttatcagcgtgaaaacgcggcaccgagtcggtgcgcctgggaccattaaagaaaatatcatctttggtgtctcctacgatgaatatagatgtaccgcggttctatctagttacgcgttaaaccaactagaa

SEQ ID NO: 2198 - RNA, 196 nt, synthetic construct
  source 1..196: mol_type = other RNA
gtctgtatctatattcatcatgtttaagagcggggaaatccgcaagtttaaataaggctagtccgttatcagcgtgaaaacgcggcaccgagtcggtgcgcctgggaccattaaagaaaatatcatctttggtgtctcgtacgatgaatatagatgatccgcggttctatctagttacgcgttaaaccaactagaa

SEQ ID NO: 2199 - RNA, 196 nt, synthetic construct
  source 1..196: mol_type = other RNA
gtctgtatctatattcatcatgtttaagagcggggaaatccgcaagtttaaataaggctagtccgttatcagcgtgaaaacgcggcaccgagtcggtgcgcctgggaccattaaagaaaatatcatctttggtgtctcgtatgatgaatatagattatccgcggttctatctagttacgcgttaaaccaactagaa

SEQ ID NO: 2200 - RNA, 196 nt, synthetic construct
  source 1..196: mol_type = other RNA
gtctgtatctatattcatcatgtttaagagcggggaaatccgcaagtttaaataaggctagtccgttatcagcgtgaaaacgcggcaccgagtcggtgcgcctgggaccattaaagaaaatatcatctttggtgtctcttacgatgaatatagatgatccgcggttctatctagttacgcgttaaaccaactagaa

SEQ ID NO: 2201 - RNA, 196 nt, synthetic construct
  source 1..196: mol_type = other RNA
gtctgtatctatattcatcatgtttaagagcggggaaatccgcaagtttaaataaggctagtccgttatcagcgtgaaaacgcggcaccgagtcggtgcgcctgggaccattaaagaaaatatcatctttggtgtctcttatgatgaatatagatgtaccgcggttctatctagttacgcgttaaaccaactagaa

SEQ ID NO: 2202 - RNA, 196 nt, synthetic construct
  source 1..196: mol_type = other RNA
gtctgtatctatattcatcatgtttaagagcggggaaatccgcaagtttaaataaggctagtccgttatcagcgtgaaaacgcggcaccgagtcggtgcgcctgggaccattaaagaaaatatcatctttggtgtttcatacgatgaatatagatgtaccgcggttctatctagttacgcgttaaaccaactagaa

SEQ ID NO: 2203 - RNA, 196 nt, synthetic construct
  source 1..196: mol_type = other RNA
gtctgtatctatattcatcatgtttaagagcggggaaatccgcaagtttaaataaggctagtccgttatcagcgtgaaaacgcggcaccgagtcggtgcgcctgggaccattaaagaaaatatcatctttggtgtttcgtacgatgaatatagattaaccgcggttctatctagttacgcgttaaaccaactagaa

SEQ ID NO: 2204 - RNA, 196 nt, synthetic construct
  source 1..196: mol_type = other RNA
gtctgtatctatattcatcatgtttaagagcggggaaatccgcaagtttaaataaggctagtccgttatcagcgtgaaaacgcggcaccgagtcggtgcgcctgggaccattaaagaaaatatcatctttggtgtttcttacgatgaatatagattaaccgcggttctatctagttacgcgttaaaccaactagaa

SEQ ID NO: 2205 - RNA, 196 nt, synthetic construct
  source 1..196: mol_type = other RNA
gtctgtatctatattcatcatgtttaagagcggggaaatccgcaagtttaaataaggctagtccgttatcagcgtgaaaacgcggcaccgagtcggtgcgcctggtacaattaaagaaaatatcatctttggagtttcctatgatgaatatagatcattcgcggttctatctagttacgcgttaaaccaactagaa

SEQ ID NO: 2206 - RNA, 196 nt, synthetic construct
  source 1..196: mol_type = other RNA
gtctgtatctatattcatcatgtttaagagcggggaaatccgcaagtttaaataaggctagtccgttatcagcgtgaaaacgcggcaccgagtcggtgcgcctggtacaattaaagaaaatatcatctttggcgtttcctatgatgaatatagattatacgcggttctatctagttacgcgttaaaccaactagaa

SEQ ID NO: 2207 - RNA, 196 nt, synthetic construct
  source 1..196: mol_type = other RNA
gtctgtatctatattcatcatgtttaagagcggggaaatccgcaagtttaaataaggctagtccgttatcagcgtgaaaacgcggcaccgagtcggtgcgcctggtacaattaaagaaaatatcatctttggggtttcctatgatgaatatagatcgttcgcggttctatctagttacgcgttaaaccaactagaa

SEQ ID NO: 2208 - RNA, 196 nt, synthetic construct
  source 1..196: mol_type = other RNA
gtctgtatctatattcatcatgtttaagagcggggaaatccgcaagtttaaataaggctagtccgttatcagcgtgaaaacgcggcaccgagtcggtgcgcctggtactattaaagaaaatatcatctttggagtttcctatgatgaatatagatgtctcgcggttctatctagttacgcgttaaaccaactagaa

SEQ ID NO: 2209 - RNA, 196 nt, synthetic construct
  source 1..196: mol_type = other RNA
gtctgtatctatattcatcatgtttaagagcggggaaatccgcaagtttaaataaggctagtccgttatcagcgtgaaaacgcggcaccgagtcggtgcgcctggtactattaaagaaaatatcatctttggcgtttcctatgatgaatatagattatacgcggttctatctagttacgcgttaaaccaactagaa

SEQ ID NO: 2210 - RNA, 196 nt, synthetic construct
  source 1..196: mol_type = other RNA
gtctgtatctatattcatcatgtttaagagcggggaaatccgcaagtttaaataaggctagtccgttatcagcgtgaaaacgcggcaccgagtcggtgcgcctggtactattaaagaaaatatcatctttggggtttcctatgatgaatatagattgttcgcggttctatctagttacgcgttaaaccaactagaa

SEQ ID NO: 2211 - RNA, 196 nt, synthetic construct
  source 1..196: mol_type = other RNA
gtctgtatctatattcatcatgtttaagagcggggaaatccgcaagtttaaataaggctagtccgttatcagcgtgaaaacgcggcaccgagtcggtgcgcctgggactatcaaagaaaatatcatctttggtgtctcatacgatgaatatagatttcccgcggttctatctagttacgcgttaaaccaactagaa

SEQ ID NO: 2212 - RNA, 196 nt, synthetic construct
  source 1..196: mol_type = other RNA
gtctgtatctatattcatcatgtttaagagcggggaaatccgcaagtttaaataaggctagtccgttatcagcgtgaaaacgcggcaccgagtcggtgcgcctgggactatcaaagaaaatatcatctttggtgtctcgtacgatgaatatagatttcccgcggttctatctagttacgcgttaaaccaactagaa

SEQ ID NO: 2213 - RNA, 196 nt, synthetic construct
  source 1..196: mol_type = other RNA
gtctgtatctatattcatcatgtttaagagcggggaaatccgcaagtttaaataaggctagtccgttatcagcgtgaaaacgcggcaccgagtcggtgcgcctgggactatcaaagaaaatatcatctttggtgtctcttacgatgaatatagatttcccgcggttctatctagttacgcgttaaaccaactagaa

SEQ ID NO: 2214 - RNA, 196 nt, synthetic construct
  source 1..196: mol_type = other RNA
gtctgtatctatattcatcatgtttaagagcggggaaatccgcaagtttaaataaggctagtccgttatcagcgtgaaaacgcggcaccgagtcggtgcgcctgggaccatcaaagaaaatataatctttggtgtctcatacgatgaatatagatgatccgcggttctatctagttacgcgttaaaccaactagaa

SEQ ID NO: 2215 - RNA, 196 nt, synthetic construct
  source 1..196: mol_type = other RNA
gtctgtatctatattcatcatgtttaagagcggggaaatccgcaagtttaaataaggctagtccgttatcagcgtgaaaacgcggcaccgagtcggtgcgcctgggaccatcaaagaaaatataatctttggtgtctcgtacgatgaatatagatgatccgcggttctatctagttacgcgttaaaccaactagaa

SEQ ID NO: 2216 - RNA, 196 nt, synthetic construct
  source 1..196: mol_type = other RNA
gtctgtatctatattcatcatgtttaagagcggggaaatccgcaagtttaaataaggctagtccgttatcagcgtgaaaacgcggcaccgagtcggtgcgcctgggaccatcaaagaaaatataatctttggtgtctcttacgatgaatatagatgatccgcggttctatctagttacgcgttaaaccaactagaa

SEQ ID NO: 2217 - RNA, 196 nt, synthetic construct
  source 1..196: mol_type = other RNA
gtctgtatctatattcatcatgtttaagagcggggaaatccgcaagtttaaataaggctagtccgttatcagcgtgaaaacgcggcaccgagtcggtgcgccaggcacgataaaggaaaacatcatcttcggtgtgtcatacgatgaatatagatttcccgcggttctatctagttacgcgttaaaccaactagaa

SEQ ID NO: 2218 - RNA, 196 nt, synthetic construct
  source 1..196: mol_type = other RNA
gtctgtatctatattcatcatgtttaagagcggggaaatccgcaagtttaaataaggctagtccgttatcagcgtgaaaacgcggcaccgagtcggtgcgccaggtaccattaaggaaaacatcatctttggcgtgtcgtatgatgaatatagattgtccgcggttctatctagttacgcgttaaaccaactagaa

SEQ ID NO: 2219 - RNA, 196 nt, synthetic construct
  source 1..196: mol_type = other RNA
gtctgtatctatattcatcatgtttaagagcggggaaatccgcaagtttaaataaggctagtccgttatcagcgtgaaaacgcggcaccgagtcggtgcgcccggaacaataaaagaaaacatcatcttcggcgtgtcgtacgatgaatatagattaatcgcggttctatctagttacgcgttaaaccaactagaa

SEQ ID NO: 2220 - RNA, 196 nt, synthetic construct
  source 1..196: mol_type = other RNA
gtctgtatctatattcatcatgtttaagagcggggaaatccgcaagtttaaataaggctagtccgttatcagcgtgaaaacgcggcaccgagtcggtgcgcccggaactattaaggaaaacataatcttcggcgtatcatacgatgaatatagattaatcgcggttctatctagttacgcgttaaaccaactagaa

SEQ ID NO: 2221 - RNA, 196 nt, synthetic construct
  source 1..196: mol_type = other RNA
gtctgtatctatattcatcatgtttaagagcggggaaatccgcaagtttaaataaggctagtccgttatcagcgtgaaaacgcggcaccgagtcggtgcgcccggcacgatcaaggagaatattatcttcggtgttagctatgatgaatatagatttcacgcggttctatctagttacgcgttaaaccaactagaa

SEQ ID NO: 2222 - RNA, 196 nt, synthetic construct
  source 1..196: mol_type = other RNA
gtctgtatctatattcatcatgtttaagagcggggaaatccgcaagtttaaataaggctagtccgttatcagcgtgaaaacgcggcaccgagtcggtgcgcccggtacaatcaaagaaaatatcatctttggggtgagttacgatgaatatagattatacgcggttctatctagttacgcgttaaaccaactagaa

SEQ ID NO: 2223 - RNA, 196 nt, synthetic construct
  source 1..196: mol_type = other RNA
gtctgtatctatattcatcatgtttaagagcggggaaatccgcaagtttaaataaggctagtccgttatcagcgtgaaaacgcggcaccgagtcggtgcgccggggacgattaaagagaatataatctttggagtttcttacgatgaatatagattatacgcggttctatctagttacgcgttaaaccaactagaa

SEQ ID NO: 2224 - RNA, 196 nt, synthetic construct
  source 1..196: mol_type = other RNA
gtctgtatctatattcatcatgtttaagagcggggaaatccgcaagtttaaataaggctagtccgttatcagcgtgaaaacgcggcaccgagtcggtgcgcctggaacgataaaagagaacattatcttcggcgttagttatgatgaatatagattatccgcggttctatctagttacgcgttaaaccaactagaa

SEQ ID NO: 2225 - RNA, 196 nt, synthetic construct
  source 1..196: mol_type = other RNA
gtctgtatctatattcatcatgtttaagagcggggaaatccgcaagtttaaataaggctagtccgttatcagcgtgaaaacgcggcaccgagtcggtgcgcctggcactattaaggagaatatcatcttcggggtatcatacgatgaatatagatcactcgcggttctatctagttacgcgttaaaccaactagaa

SEQ ID NO: 2226 - RNA, 196 nt, synthetic construct
  source 1..196: mol_type = other RNA
gtctgtatctatattcatcatgtttaagagcggggaaatccgcaagtttaaataaggctagtccgttatcagcgtgaaaacgcggcaccgagtcggtgcgcctgggacaatcaaagagaatatcatcttcggtgtttcatacgatgaatatagattagccgcggttctatctagttacgcgttaaaccaactagaa

SEQ ID NO: 2227 - RNA, 196 nt, synthetic construct
  source 1..196: mol_type = other RNA
gtctgtatctatattcatcatgtttaagagcggggaaatccgcaagtttaaataaggctagtccgttatcagcgtgaaaacgcggcaccgagtcggtgcgcctggcaccattaaagaaaatatcatcttcggtgtttcctatgatgaatatagatgactcgcggttctatctagttacgcgttaaaccaactagaa

SEQ ID NO: 2228 - RNA, 196 nt, synthetic construct
  source 1..196: mol_type = other RNA
gtctgtatctatattcatcatgtttaagagcggggaaatccgcaagtttaaataaggctagtccgttatcagcgtgaaaacgcggcaccgagtcggtgcgcctggcaccattaaagaaaatatcatctttggtgtttcctatgatgaatatagatgattcgcggttctatctagttacgcgttaaaccaactagaa

SEQ ID NO: 2229 - RNA, 196 nt, synthetic construct
  source 1..196: mol_type = other RNA
gtctgtatctatattcatcatgtttaagagcggggaaatccgcaagtttaaataaggctagtccgttatcagcgtgaaaacgcggcaccgagtcggtgcgcctggcaccattaaagaaaatatcatctttggtgtttcgtatgatgaatatagatgtatcgcggttctatctagttacgcgttaaaccaactagaa

SEQ ID NO: 2230 - RNA, 196 nt, synthetic construct
  source 1..196: mol_type = other RNA
gtctgtatctatattcatcatgtttaagagcggggaaatccgcaagtttaaataaggctagtccgttatcagcgtgaaaacgcggcaccgagtcggtgcgcctggcactattaaagaaaatatcatctttggtgtttcctatgatgaatatagatctctcgcggttctatctagttacgcgttaaaccaactagaa

SEQ ID NO: 2231 - RNA, 196 nt, synthetic construct
  source 1..196: mol_type = other RNA
gtctgtatctatattcatcatgtttaagagcggggaaatccgcaagtttaaataaggctagtccgttatcagcgtgaaaacgcggcaccgagtcggtgcgccgggcaccattaaagaaaatatcatctttggtgtttcgtatgatgaatatagattaatcgcggttctatctagttacgcgttaaaccaactagaa

SEQ ID NO: 2232 - RNA, 196 nt, synthetic construct
  source 1..196: mol_type = other RNA
gtctgtatctatattcatcatgtttaagagcggggaaatccgcaagtttaaataaggctagtccgttatcagcgtgaaaacgcggcaccgagtcggtgcgcctggcaccatcaaagagaacatcatctttggtgttagctatgatgaatatagattactcgcggttctatctagttacgcgttaaaccaactagaa

SEQ ID NO: 2233 - RNA, 196 nt, synthetic construct
  source 1..196: mol_type = other RNA
gtctgtatctatattcatcatgtttaagagcggggaaatccgcaagtttaaataaggctagtccgttatcagcgtgaaaacgcggcaccgagtcggtgcgcctggcaccatcaaagagaacatcatctttggtgtttcgtatgatgaatatagatcactcgcggttctatctagttacgcgttaaaccaactagaa

SEQ ID NO: 2234 - RNA, 196 nt, synthetic construct
  source 1..196: mol_type = other RNA
gtctgtatctatattcatcatgtttaagagcggggaaatccgcaagtttaaataaggctagtccgttatcagcgtgaaaacgcggcaccgagtcggtgcgcctggcaccattaaagaaaatatcatctttggtgttagttatgatgaatatagatgtcccgcggttctatctagttacgcgttaaaccaactagaa

SEQ ID NO: 2235 - RNA, 196 nt, synthetic construct
  source 1..196: mol_type = other RNA
gtctgtatctatattcatcatgtttaagagcggggaaatccgcaagtttaaataaggctagtccgttatcagcgtgaaaacgcggcaccgagtcggtgcgccaggcaccattaaagaaaatatcatctttggtgtttcctatgatgaatatagattatccgcggttctatctagttacgcgttaaaccaactagaa

SEQ ID NO: 2236 - RNA, 196 nt, synthetic construct
  source 1..196: mol_type = other RNA
gtctgtatctatattcatcatgtttaagagcggggaaatccgcaagtttaaataaggctagtccgttatcagcgtgaaaacgcggcaccgagtcggtgcgcccggcaccattaaagaaaatatcatctttggtgtttcctatgatgaatatagatgaatcgcggttctatctagttacgcgttaaaccaactagaa

SEQ ID NO: 2237 - RNA, 196 nt, synthetic construct
  source 1..196: mol_type = other RNA
gtctgtatctatattcatcatgtttaagagcggggaaatccgcaagtttaaataaggctagtccgttatcagcgtgaaaacgcggcaccgagtcggtgcgccgggcaccattaaagaaaatatcatctttggtgtttcctatgatgaatatagatgacacgcggttctatctagttacgcgttaaaccaactagaa

SEQ ID NO: 2238 - RNA, 196 nt, synthetic construct
  source 1..196: mol_type = other RNA
gtctgtatctatattcatcatgtttaagagcggggaaatccgcaagtttaaataaggctagtccgttatcagcgtgaaaacgcggcaccgagtcggtgcgcctggaaccattaaagaaaatatcatctttggtgtttcctatgatgaatatagatgtcccgcggttctatctagttacgcgttaaaccaactagaa

SEQ ID NO: 2239 - RNA, 196 nt, synthetic construct
  source 1..196: mol_type = other RNA
gtctgtatctatattcatcatgtttaagagcggggaaatccgcaagtttaaataaggctagtccgttatcagcgtgaaaacgcggcaccgagtcggtgcgcctggcacaattaaagaaaatatcatctttggtgtttcctatgatgaatatagatctctcgcggttctatctagttacgcgttaaaccaactagaa

SEQ ID NO: 2240 - RNA, 196 nt, synthetic construct
  source 1..196: mol_type = other RNA
gtctgtatctatattcatcatgtttaagagcggggaaatccgcaagtttaaataaggctagtccgttatcagcgtgaaaacgcggcaccgagtcggtgcgcctggcaccataaaagaaaatatcatctttggtgtttcctatgatgaatatagatgtatcgcggttctatctagttacgcgttaaaccaactagaa

SEQ ID NO: 2241 - RNA, 196 nt, synthetic construct
  source 1..196: mol_type = other RNA
gtctgtatctatattcatcatgtttaagagcggggaaatccgcaagtttaaataaggctagtccgttatcagcgtgaaaacgcggcaccgagtcggtgcgcctggcaccatcaaagaaaatatcatctttggtgtttcctatgatgaatatagatcactcgcggttctatctagttacgcgttaaaccaactagaa

SEQ ID NO: 2242 - RNA, 196 nt, synthetic construct
  source 1..196: mol_type = other RNA
gtctgtatctatattcatcatgtttaagagcggggaaatccgcaagtttaaataaggctagtccgttatcagcgtgaaaacgcggcaccgagtcggtgcgcctggcaccattaaagaaaacatcatctttggtgtttcctatgatgaatatagatcaatcgcggttctatctagttacgcgttaaaccaactagaa

SEQ ID NO: 2243 - RNA, 196 nt, synthetic construct
  source 1..196: mol_type = other RNA
gtctgtatctatattcatcatgtttaagagcggggaaatccgcaagtttaaataaggctagtccgttatcagcgtgaaaacgcggcaccgagtcggtgcgcctggcaccattaaagaaaatataatctttggtgtttcctatgatgaatatagatctctcgcggttctatctagttacgcgttaaaccaactagaa

SEQ ID NO: 2244 - RNA, 196 nt, synthetic construct
  source 1..196: mol_type = other RNA
gtctgtatctatattcatcatgtttaagagcggggaaatccgcaagtttaaataaggctagtccgttatcagcgtgaaaacgcggcaccgagtcggtgcgcctggcaccattaaagaaaatatcatctttggagtttcctatgatgaatatagattattcgcggttctatctagttacgcgttaaaccaactagaa

SEQ ID NO: 2245 - RNA, 196 nt, synthetic construct
  source 1..196: mol_type = other RNA
gtctgtatctatattcatcatgtttaagagcggggaaatccgcaagtttaaataaggctagtccgttatcagcgtgaaaacgcggcaccgagtcggtgcgcctggcaccattaaagaaaatatcatctttggcgtttcctatgatgaatatagatcaaccgcggttctatctagttacgcgttaaaccaactagaa

SEQ ID NO: 2246 - RNA, 196 nt, synthetic construct
  source 1..196: mol_type = other RNA
gtctgtatctatattcatcatgtttaagagcggggaaatccgcaagtttaaataaggctagtccgttatcagcgtgaaaacgcggcaccgagtcggtgcgcctggcaccattaaagaaaatatcatctttggggtttcctatgatgaatatagattatccgcggttctatctagttacgcgttaaaccaactagaa

SEQ ID NO: 2247 - RNA, 196 nt, synthetic construct
  source 1..196: mol_type = other RNA
gtctgtatctatattcatcatgtttaagagcggggaaatccgcaagtttaaataaggctagtccgttatcagcgtgaaaacgcggcaccgagtcggtgcgcctggcaccattaaagaaaatatcatctttggtgtatcctatgatgaatatagatgtatcgcggttctatctagttacgcgttaaaccaactagaa

SEQ ID NO: 2248 - RNA, 196 nt, synthetic construct
  source 1..196: mol_type = other RNA
gtctgtatctatattcatcatgtttaagagcggggaaatccgcaagtttaaataaggctagtccgttatcagcgtgaaaacgcggcaccgagtcggtgcgcctggcaccattaaagaaaatatcatctttggtgtctcctatgatgaatatagatctcccgcggttctatctagttacgcgttaaaccaactagaa

SEQ ID NO: 2249 - RNA, 196 nt, synthetic construct
  source 1..196: mol_type = other RNA
gtctgtatctatattcatcatgtttaagagcggggaaatccgcaagtttaaataaggctagtccgttatcagcgtgaaaacgcggcaccgagtcggtgcgcctggcaccattaaagaaaatatcatctttggtgtgtcctatgatgaatatagatgtcccgcggttctatctagttacgcgttaaaccaactagaa

SEQ ID NO: 2250 - RNA, 196 nt, synthetic construct
  source 1..196: mol_type = other RNA
gtctgtatctatattcatcatgtttaagagcggggaaatccgcaagtttaaataaggctagtccgttatcagcgtgaaaacgcggcaccgagtcggtgcgcctggcaccattaaagaaaatatcatctttggtgtttcatatgatgaatatagatgtatcgcggttctatctagttacgcgttaaaccaactagaa

SEQ ID NO: 2251 - RNA, 196 nt, synthetic construct
  source 1..196: mol_type = other RNA
gtctgtatctatattcatcatgtttaagagcggggaaatccgcaagtttaaataaggctagtccgttatcagcgtgaaaacgcggcaccgagtcggtgcgcctggcaccattaaagaaaatatcatctttggtgtttcctacgatgaatatagatctcccgcggttctatctagttacgcgttaaaccaactagaa

SEQ ID NO: 2252 - RNA, 196 nt, synthetic construct
  source 1..196: mol_type = other RNA
gtctgtatctatattcatcatgtttaagagcggggaaatccgcaagtttaaataaggctagtccgttatcagcgtgaaaacgcggcaccgagtcggtgcgcctggcaccattaaagaaaatatcatctttggtgtttcttatgatgaatatagatgattcgcggttctatctagttacgcgttaaaccaactagaa

SEQ ID NO: 2253 - RNA, 196 nt, synthetic construct
  source 1..196: mol_type = other RNA
gtctgtatctatattcatcatgtttaagagcggggaaatccgcaagtttaaataaggctagtccgttatcagcgtgaaaacgcggcaccgagtcggtgcgcctggcaccattaaagaaaatattatctttggtgtttcctatgatgaatatagattactcgcggttctatctagttacgcgttaaaccaactagaa

SEQ ID NO: 2254 - RNA, 196 nt, synthetic construct
  source 1..196: mol_type = other RNA
gtctgtatctatattcatcatgtttaagagcggggaaatccgcaagtttaaataaggctagtccgttatcagcgtgaaaacgcggcaccgagtcggtgcgcctggcaccattaaagagaatatcatctttggtgtttcctatgatgaatatagatgattcgcggttctatctagttacgcgttaaaccaactagaa

SEQ ID NO: 2255 - RNA, 196 nt, synthetic construct
  source 1..196: mol_type = other RNA
gtctgtatctatattcatcatgtttaagagcggggaaatccgcaagtttaaataaggctagtccgttatcagcgtgaaaacgcggcaccgagtcggtgcgcctggcaccattaaggaaaatatcatctttggtgtttcctatgatgaatatagattactcgcggttctatctagttacgcgttaaaccaactagaa

SEQ ID NO: 2256 - RNA, 196 nt, synthetic construct
  source 1..196: mol_type = other RNA
gtctgtatctatattcatcatgtttaagagcggggaaatccgcaagtttaaataaggctagtccgttatcagcgtgaaaacgcggcaccgagtcggtgcgcctggcacgattaaagaaaatatcatctttggtgtttcctatgatgaatatagattactcgcggttctatctagttacgcgttaaaccaactagaa

SEQ ID NO: 2257 - RNA, 196 nt, synthetic construct
  source 1..196: mol_type = other RNA
gtctgtatctatattcatcatgtttaagagcggggaaatccgcaagtttaaataaggctagtccgttatcagcgtgaaaacgcggcaccgagtcggtgcgcctgggaccattaaagaaaatatcatctttggtgtttcctatgatgaatatagattaaccgcggttctatctagttacgcgttaaaccaactagaa

SEQ ID NO: 2258 - RNA, 196 nt, synthetic construct
  source 1..196: mol_type = other RNA
gtctgtatctatattcatcatgtttaagagcggggaaatccgcaagtttaaataaggctagtccgttatcagcgtgaaaacgcggcaccgagtcggtgcgcctggtaccattaaagaaaatatcatctttggtgtttcctatgatgaatatagatctgtcgcggttctatctagttacgcgttaaaccaactagaa

SEQ ID NO: 2259 - RNA, 196 nt, synthetic construct
  source 1..196: mol_type = other RNA
gtctgtatctatattcatcatgtttaagagcggggaaatccgcaagtttaaataaggctagtccgttatcagcgtgaaaacgcggcaccgagtcggtgcgccgggcaccatcaaagagaacatcatctttggtgttagctatgatgaatatagatctctcgcggttctatctagttacgcgttaaaccaactagaa

SEQ ID NO: 2260 - RNA, 196 nt, synthetic construct
  source 1..196: mol_type = other RNA
gtctgtatctatattcatcatgtttaagagcggggaaatccgcaagtttaaataaggctagtccgttatcagcgtgaaaacgcggcaccgagtcggtgcgccgggcaccattaaagagaatatcatctttggtgtttcgtatgatgaatatagatgtatcgcggttctatctagttacgcgttaaaccaactagaa

SEQ ID NO: 2261 - RNA, 196 nt, synthetic construct
  source 1..196: mol_type = other RNA
gtctgtatctatattcatcatgtttaagagcggggaaatccgcaagtttaaataaggctagtccgttatcagcgtgaaaacgcggcaccgagtcggtgcgcctggcaccatcaaagagaacatcatctttggtgtttcatatgatgaatatagatctctcgcggttctatctagttacgcgttaaaccaactagaa

SEQ ID NO: 2262 - RNA, 196 nt, synthetic construct
  source 1..196: mol_type = other RNA
gtctgtatctatattcatcatgtttaagagcggggaaatccgcaagtttaaataaggctagtccgttatcagcgtgaaaacgcggcaccgagtcggtgcgcctggcaccattaaagaaaatatcatctttggcgtcagttacgatgaatatagatttcccgcggttctatctagttacgcgttaaaccaactagaa

SEQ ID NO: 2263 - RNA, 196 nt, synthetic construct
  source 1..196: mol_type = other RNA
gtctgtatctatattcatcatgtttaagagcggggaaatccgcaagtttaaataaggctagtccgttatcagcgtgaaaacgcggcaccgagtcggtgcgcctggcaccattaaagaaaatatcatctttggtgttagctatgatgaatatagatgtaccgcggttctatctagttacgcgttaaaccaactagaa

SEQ ID NO: 2264 - RNA, 196 nt, synthetic construct
  source 1..196: mol_type = other RNA
gtctgtatctatattcatcatgtttaagagcggggaaatccgcaagtttaaataaggctagtccgttatcagcgtgaaaacgcggcaccgagtcggtgcgcctggcaccattaaagagaatatcatctttggtgttagctatgatgaatatagatgatccgcggttctatctagttacgcgttaaaccaactagaa

SEQ ID NO: 2265 - RNA, 196 nt, synthetic construct
  source 1..196: mol_type = other RNA
gtctgtatctatattcatcatgtttaagagcggggaaatccgcaagtttaaataaggctagtccgttatcagcgtgaaaacgcggcaccgagtcggtgctgcctggcaccattaaagaaaatatcatctttggtgtttcctatgatgaatatagatacacgcggttctatctagttacgcgttaaaccaactagaa

SEQ ID NO: 2266 - RNA, 196 nt, synthetic construct
  source 1..196: mol_type = other RNA
gtctgtatctatattcatcatgtttaagagcggggaaatccgcaagtttaaataaggctagtccgttatcagcgtgaaaacgcggcaccgagtcggtgcatgcctggcaccattaaagaaaatatcatctttggtgtttcctatgatgaatatagataccgcggttctatctagttacgcgttaaaccaactagaa

SEQ ID NO: 2267 - RNA, 196 nt, synthetic construct
  source 1..196: mol_type = other RNA
gtctgtatctatattcatcatgtttaagagcggggaaatccgcaagtttaaataaggctagtccgttatcagcgtgaaaacgcggcaccgagtcggtgctatgcctggcaccattaaagaaaatatcatctttggtgtttcctatgatgaatatagatacgcggttctatctagttacgcgttaaaccaactagaa

SEQ ID NO: 2268 - RNA, 196 nt, synthetic construct
  source 1..196: mol_type = other RNA
gcagttttcctggattatgccgtttaagagcggggaaatccgcaagtttaaataaggctagtccgttatcagcgtgaaaacgcggcaccgagtcggtgctcataggaaacaccaaagatgatattttctttaatggtgccaggcataatccaggaaaaccgcggttctatctagttacgcgttaaaccaactagaa

SEQ ID NO: 2269 - RNA, 196 nt, synthetic construct
  source 1..196: mol_type = other RNA
gcagttttcctggattatgccgtttaagagcggggaaatccgcaagtttaaataaggctagtccgttatcagcgtgaaaacgcggcaccgagtcggtgcatcataggaaacaccaaagatgatattttctttaatggtgccaggcataatccaggaaaacgcggttctatctagttacgcgttaaaccaactagaa

SEQ ID NO: 2270 - RNA, 196 nt, synthetic construct
  source 1..196: mol_type = other RNA
gcagttttcctggattatgccgtttaagagcggggaaatccgcaagtttaaataaggctagtccgttatcagcgtgaaaacgcggcaccgagtcggtgccatcataggaaacaccaaagatgatattttctttaatggtgccaggcataatccaggaaacgcggttctatctagttacgcgttaaaccaactagaa

SEQ ID NO: 2271 - RNA, 196 nt, synthetic construct
  source 1..196: mol_type = other RNA
gcagttttcctggattatgccgtttaagagcggggaaatccgcaagtttaaataaggctagtccgttatcagcgtgaaaacgcggcaccgagtcggtgctcatcataggaaacaccaaagatgatattttctttaatggtgccaggcataatccaggaacgcggttctatctagttacgcgttaaaccaactagaa

SEQ ID NO: 2272 - RNA, 196 nt, synthetic construct
  source 1..196: mol_type = other RNA
gcagttttcctggattatgccgtttaagagcggggaaatccgcaagtttaaataaggctagtccgttatcagcgtgaaaacgcggcaccgagtcggtgcttcatcataggaaacaccaaagatgatattttctttaatggtgccaggcataatccaggacgcggttctatctagttacgcgttaaaccaactagaa

SEQ ID NO: 2273 - RNA, 196 nt, synthetic construct
  source 1..196: mol_type = other RNA
gcagttttcctggattatgccgtttaagagcggggaaatccgcaagtttaaataaggctagtccgttatcagcgtgaaaacgcggcaccgagtcggtgcattcatcataggaaacaccaaagatgatattttctttaatggtgccaggcataatccaggcgcggttctatctagttacgcgttaaaccaactagaa

SEQ ID NO: 2274 - RNA, 197 nt, synthetic construct
  source 1..197: mol_type = other RNA
gaccattaaagaaaatatcatgtttaagagcggggaaatccgcaagtttaaataaggctagtccgttatcagcgtgaaaacgcggcaccgagtcggtgccacttctgtatctatattcatcataggaaacaccaaagatgatattttctttaatggagaccgcggttctatctagttacgcgttaaaccaactagaa

SEQ ID NO: 2275 - RNA, 197 nt, synthetic construct
  source 1..197: mol_type = other RNA
gaccattaaagaaaatatcatgtttaagagcggggaaatccgcaagtttaaataaggctagtccgttatcagcgtgaaaacgcggcaccgagtcggtgccgctcctgtatctatattcatcataggaaacaccaaagatgatattttctttaatggcttccgcggttctatctagttacgcgttaaaccaactagaa

SEQ ID NO: 2276 - RNA, 197 nt, synthetic construct
  source 1..197: mol_type = other RNA
gaccattaaagaaaatatcatgtttaagagcggggaaatccgcaagtttaaataaggctagtccgttatcagcgtgaaaacgcggcaccgagtcggtgccgcttcggtatctatattcatcataggaaacaccaaagatgatattttctttaatggcacccgcggttctatctagttacgcgttaaaccaactagaa

SEQ ID NO: 2277 - RNA, 197 nt, synthetic construct
  source 1..197: mol_type = other RNA
gaccattaaagaaaatatcatgtttaagagcggggaaatccgcaagtttaaataaggctagtccgttatcagcgtgaaaacgcggcaccgagtcggtgccgcttctatatctatattcatcataggaaacaccaaagatgatattttctttaatggcttccgcggttctatctagttacgcgttaaaccaactagaa

SEQ ID NO: 2278 - RNA, 197 nt, synthetic construct
  source 1..197: mol_type = other RNA
gaccattaaagaaaatatcatgtttaagagcggggaaatccgcaagtttaaataaggctagtccgttatcagcgtgaaaacgcggcaccgagtcggtgccgcttctgtacctatattcatcataggaaacaccaaagatgatattttctttaatggctgccgcggttctatctagttacgcgttaaaccaactagaa

SEQ ID NO: 2279 - RNA, 197 nt, synthetic construct
  source 1..197: mol_type = other RNA
gaccattaaagaaaatatcatgtttaagagcggggaaatccgcaagtttaaataaggctagtccgttatcagcgtgaaaacgcggcaccgagtcggtgccgcttctgtatcgatattcatcataggaaacaccaaagatgatattttctttaatggatcccgcggttctatctagttacgcgttaaaccaactagaa

SEQ ID NO: 2280 - RNA, 197 nt, synthetic construct
  source 1..197: mol_type = other RNA
gaccattaaagaaaatatcatgtttaagagcggggaaatccgcaagtttaaataaggctagtccgttatcagcgtgaaaacgcggcaccgagtcggtgccgcttctgtatctatactcatcataggaaacaccaaagatgatattttctttaatggaatccgcggttctatctagttacgcgttaaaccaactagaa

SEQ ID NO: 2281 - RNA, 197 nt, synthetic construct
  source 1..197: mol_type = other RNA
gaccattaaagaaaatatcatgtttaagagcggggaaatccgcaagtttaaataaggctagtccgttatcagcgtgaaaacgcggcaccgagtcggtgccgcttctgtatctatattcatcataagaaacaccaaagatgatattttctttaatggcaaccgcggttctatctagttacgcgttaaaccaactagaa

SEQ ID NO: 2282 - RNA, 197 nt, synthetic construct
  source 1..197: mol_type = other RNA
gaccattaaagaaaatatcatgtttaagagcggggaaatccgcaagtttaaataaggctagtccgttatcagcgtgaaaacgcggcaccgagtcggtgccgcttctgtatctatattcatcatacgaaacaccaaagatgatattttctttaatggatcccgcggttctatctagttacgcgttaaaccaactagaa

SEQ ID NO: 2283 - RNA, 197 nt, synthetic construct
  source 1..197: mol_type = other RNA
gaccattaaagaaaatatcatgtttaagagcggggaaatccgcaagtttaaataaggctagtccgttatcagcgtgaaaacgcggcaccgagtcggtgccgcttctgtatctatattcatcataggaaacaccaaagataatattttctttaatggcaaccgcggttctatctagttacgcgttaaaccaactagaa

SEQ ID NO: 2284 - RNA, 197 nt, synthetic construct
  source 1..197: mol_type = other RNA
gaccattaaagaaaatatcatgtttaagagcggggaaatccgcaagtttaaataaggctagtccgttatcagcgtgaaaacgcggcaccgagtcggtgccgcttctgtatctatattcatcataggaaacaccaaagatgatattttctttaatggcacccgcggttctatctagttacgcgttaaaccaactagaa

SEQ ID NO: 2285 - RNA, 197 nt, synthetic construct
  source 1..197: mol_type = other RNA
gaccattaaagaaaatatcatgtttaagagcggggaaatccgcaagtttaaataaggctagtccgttatcagcgtgaaaacgcggcaccgagtcggtgccgcttctgtatctatattcatcataggaaacaccaaagattatattttctttaatggcacccgcggttctatctagttacgcgttaaaccaactagaa

SEQ ID NO: 2286 - RNA, 197 nt, synthetic construct
  source 1..197: mol_type = other RNA
gaccattaaagaaaatatcatgtttaagagcggggaaatccgcaagtttaaataaggctagtccgttatcagcgtgaaaacgcggcaccgagtcggtgccgcttctgtatctatattcatcataggaaacaccgaagatgatattttctttaatggcttccgcggttctatctagttacgcgttaaaccaactagaa

SEQ ID NO: 2287 - RNA, 197 nt, synthetic construct
  source 1..197: mol_type = other RNA
gaccattaaagaaaatatcatgtttaagagcggggaaatccgcaagtttaaataaggctagtccgttatcagcgtgaaaacgcggcaccgagtcggtgccgcttctgtatctatattcatcataggaaaccccaaagatgatattttctttaatggcatccgcggttctatctagttacgcgttaaaccaactagaa

SEQ ID NO: 2288 - RNA, 197 nt, synthetic construct
  source 1..197: mol_type = other RNA
gaccattaaagaaaatatcatgtttaagagcggggaaatccgcaagtttaaataaggctagtccgttatcagcgtgaaaacgcggcaccgagtcggtgccgcttctgtatctatattcatcataggaaacgccaaagatgatattttctttaatggattccgcggttctatctagttacgcgttaaaccaactagaa

SEQ ID NO: 2289 - RNA, 197 nt, synthetic construct
  source 1..197: mol_type = other RNA
gaccattaaagaaaatatcatgtttaagagcggggaaatccgcaagtttaaataaggctagtccgttatcagcgtgaaaacgcggcaccgagtcggtgccgcttctgtatctatattcatcataggaaactccaaagatgatattttctttaatggcaaccgcggttctatctagttacgcgttaaaccaactagaa

SEQ ID NO: 2290 - RNA, 197 nt, synthetic construct
  source 1..197: mol_type = other RNA
gaccattaaagaaaatatcatgtttaagagcggggaaatccgcaagtttaaataaggctagtccgttatcagcgtgaaaacgcggcaccgagtcggtgccgcttctgtatctatattcatcataggacacaccaaagatgatattttctttaatggattccgcggttctatctagttacgcgttaaaccaactagaa

SEQ ID NO: 2291 - RNA, 197 nt, synthetic construct
  source 1..197: mol_type = other RNA
gaccattaaagaaaatatcatgtttaagagcggggaaatccgcaagtttaaataaggctagtccgttatcagcgtgaaaacgcggcaccgagtcggtgccgcttctgtatctatattcatcataggagacaccaaagatgatattttctttaatggaaaccgcggttctatctagttacgcgttaaaccaactagaa

SEQ ID NO: 2292 - RNA, 197 nt, synthetic construct
  source 1..197: mol_type = other RNA
gaccattaaagaaaatatcatgtttaagagcggggaaatccgcaagtttaaataaggctagtccgttatcagcgtgaaaacgcggcaccgagtcggtgccgcttctgtatctatattcatcataggatacaccaaagatgatattttctttaatggcgcccgcggttctatctagttacgcgttaaaccaactagaa

SEQ ID NO: 2293 - RNA, 197 nt, synthetic construct
  source 1..197: mol_type = other RNA
gaccattaaagaaaatatcatgtttaagagcggggaaatccgcaagtttaaataaggctagtccgttatcagcgtgaaaacgcggcaccgagtcggtgccgcttctgtatctatattcatcatatgaaacaccaaagatgatattttctttaatggagtccgcggttctatctagttacgcgttaaaccaactagaa

SEQ ID NO: 2294 - RNA, 197 nt, synthetic construct
  source 1..197: mol_type = other RNA
gaccattaaagaaaatatcatgtttaagagcggggaaatccgcaagtttaaataaggctagtccgttatcagcgtgaaaacgcggcaccgagtcggtgccgcttctgtatctatattcatcgtaggaaacaccaaagatgatattttctttaatggcaaccgcggttctatctagttacgcgttaaaccaactagaa

SEQ ID NO: 2295 - RNA, 197 nt, synthetic construct
  source 1..197: mol_type = other RNA
gaccattaaagaaaatatcatgtttaagagcggggaaatccgcaagtttaaataaggctagtccgttatcagcgtgaaaacgcggcaccgagtcggtgccgcttctgtatctatattcgtcataggaaacaccaaagatgatattttctttaatggaatccgcggttctatctagttacgcgttaaaccaactagaa

SEQ ID NO: 2296 - RNA, 197 nt, synthetic construct
  source 1..197: mol_type = other RNA
gaccattaaagaaaatatcatgtttaagagcggggaaatccgcaagtttaaataaggctagtccgttatcagcgtgaaaacgcggcaccgagtcggtgccgcttctgtatctgtattcatcataggaaacaccaaagatgatattttctttaatggctgccgcggttctatctagttacgcgttaaaccaactagaa

SEQ ID NO: 2297 - RNA, 197 nt, synthetic construct
  source 1..197: mol_type = other RNA
gtctgtatctatattcatcatgtttaagagcggggaaatccgcaagtttaaataaggctagtccgttatcagcgtgaaaacgcggcaccgagtcggtgcatgcctggcaccattaaagaaaatatcatctttggtgtttcctatgatgaatatagatacacgcggttctatctagttacgcgttaaaccaactagaa

SEQ ID NO: 2298 - RNA, 197 nt, synthetic construct
  source 1..197: mol_type = other RNA
gtctgtatctatattcatcatgtttaagagcggggaaatccgcaagtttaaataaggctagtccgttatcagcgtgaaaacgcggcaccgagtcggtgctatgcctggcaccattaaagaaaatatcatctttggtgtttcctatgatgaatatagataccgcggttctatctagttacgcgttaaaccaactagaa

SEQ ID NO: 2299 - RNA, 197 nt, synthetic construct
  source 1..197: mol_type = other RNA
gcagttttcctggattatgccgtttaagagcggggaaatccgcaagtttaaataaggctagtccgttatcagcgtgaaaacgcggcaccgagtcggtgcatcataggaaacaccaaagatgatattttctttaatggtgccaggcataatccaggaaaaccgcggttctatctagttacgcgttaaaccaactagaa

SEQ ID NO: 2300 - RNA, 197 nt, synthetic construct
  source 1..197: mol_type = other RNA
gcagttttcctggattatgccgtttaagagcggggaaatccgcaagtttaaataaggctagtccgttatcagcgtgaaaacgcggcaccgagtcggtgccatcataggaaacaccaaagatgatattttctttaatggtgccaggcataatccaggaaaacgcggttctatctagttacgcgttaaaccaactagaa

SEQ ID NO: 2301 - RNA, 197 nt, synthetic construct
  source 1..197: mol_type = other RNA
gcagttttcctggattatgccgtttaagagcggggaaatccgcaagtttaaataaggctagtccgttatcagcgtgaaaacgcggcaccgagtcggtgctcatcataggaaacaccaaagatgatattttctttaatggtgccaggcataatccaggaaacgcggttctatctagttacgcgttaaaccaactagaa

SEQ ID NO: 2302 - RNA, 197 nt, synthetic construct
  source 1..197: mol_type = other RNA
gcagttttcctggattatgccgtttaagagcggggaaatccgcaagtttaaataaggctagtccgttatcagcgtgaaaacgcggcaccgagtcggtgcttcatcataggaaacaccaaagatgatattttctttaatggtgccaggcataatccaggaacgcggttctatctagttacgcgttaaaccaactagaa

SEQ ID NO: 2303 - RNA, 197 nt, synthetic construct
  source 1..197: mol_type = other RNA
gcagttttcctggattatgccgtttaagagcggggaaatccgcaagtttaaataaggctagtccgttatcagcgtgaaaacgcggcaccgagtcggtgcattcatcataggaaacaccaaagatgatattttctttaatggtgccaggcataatccaggacgcggttctatctagttacgcgttaaaccaactagaa

SEQ ID NO: 2304 - RNA, 198 nt, synthetic construct
  source 1..198: mol_type = other RNA
gtctgtatctatattcatcatgtttaagagcggggaaatccgcaagtttaaataaggctagtccgttatcagcgtgaaaacgcggcaccgagtcggtgctatgcctggcaccattaaagaaaatatcatctttggtgtttcctatgatgaatatagatacacgcggttctatctagttacgcgttaaaccaactagaa

SEQ ID NO: 2305 - RNA, 198 nt, synthetic construct
  source 1..198: mol_type = other RNA
gcagttttcctggattatgccgtttaagagcggggaaatccgcaagtttaaataaggctagtccgttatcagcgtgaaaacgcggcaccgagtcggtgccatcataggaaacaccaaagatgatattttctttaatggtgccaggcataatccaggaaaaccgcggttctatctagttacgcgttaaaccaactagaa

SEQ ID NO: 2306 - RNA, 198 nt, synthetic construct
  source 1..198: mol_type = other RNA
gcagttttcctggattatgccgtttaagagcggggaaatccgcaagtttaaataaggctagtccgttatcagcgtgaaaacgcggcaccgagtcggtgctcatcataggaaacaccaaagatgatattttctttaatggtgccaggcataatccaggaaaacgcggttctatctagttacgcgttaaaccaactagaa

SEQ ID NO: 2307 - RNA, 198 nt, synthetic construct
  source 1..198: mol_type = other RNA
gcagttttcctggattatgccgtttaagagcggggaaatccgcaagtttaaataaggctagtccgttatcagcgtgaaaacgcggcaccgagtcggtgcttcatcataggaaacaccaaagatgatattttctttaatggtgccaggcataatccaggaaacgcggttctatctagttacgcgttaaaccaactagaa

SEQ ID NO: 2308 - RNA, 198 nt, synthetic construct
  source 1..198: mol_type = other RNA
gcagttttcctggattatgccgtttaagagcggggaaatccgcaagtttaaataaggctagtccgttatcagcgtgaaaacgcggcaccgagtcggtgcattcatcataggaaacaccaaagatgatattttctttaatggtgccaggcataatccaggaacgcggttctatctagttacgcgttaaaccaactagaa

SEQ ID NO: 2309 - RNA, 199 nt, synthetic construct
  source 1..199: mol_type = other RNA
gcagttttcctggattatgccgtttaagagcggggaaatccgcaagtttaaataaggctagtccgttatcagcgtgaaaacgcggcaccgagtcggtgctcatcataggaaacaccaaagatgatattttctttaatggtgccaggcataatccaggaaaaccgcggttctatctagttacgcgttaaaccaactagaa

SEQ ID NO: 2310 - RNA, 199 nt, synthetic construct
  source 1..199: mol_type = other RNA
gcagttttcctggattatgccgtttaagagcggggaaatccgcaagtttaaataaggctagtccgttatcagcgtgaaaacgcggcaccgagtcggtgcttcatcataggaaacaccaaagatgatattttctttaatggtgccaggcataatccaggaaaacgcggttctatctagttacgcgttaaaccaactagaa

SEQ ID NO: 2311 - RNA, 199 nt, synthetic construct
  source 1..199: mol_type = other RNA
gcagttttcctggattatgccgtttaagagcggggaaatccgcaagtttaaataaggctagtccgttatcagcgtgaaaacgcggcaccgagtcggtgcattcatcataggaaacaccaaagatgatattttctttaatggtgccaggcataatccaggaaacgcggttctatctagttacgcgttaaaccaactagaa

SEQ ID NO: 2312 - RNA, 200 nt, synthetic construct
  source 1..200: mol_type = other RNA
gcagttttcctggattatgccgtttaagagcggggaaatccgcaagtttaaataaggctagtccgttatcagcgtgaaaacgcggcaccgagtcggtgcttcatcataggaaacaccaaagatgatattttctttaatggtgccaggcataatccaggaaaaccgcggttctatctagttacgcgttaaaccaactagaa

SEQ ID NO: 2313 - RNA, 200 nt, synthetic construct
  source 1..200: mol_type = other RNA
gcagttttcctggattatgccgtttaagagcggggaaatccgcaagtttaaataaggctagtccgttatcagcgtgaaaacgcggcaccgagtcggtgcattcatcataggaaacaccaaagatgatattttctttaatggtgccaggcataatccaggaaaacgcggttctatctagttacgcgttaaaccaactagaa

SEQ ID NO: 2314 - RNA, 201 nt, synthetic construct
  source 1..201: mol_type = other RNA
gcagttttcctggattatgccgtttaagagcggggaaatccgcaagtttaaataaggctagtccgttatcagcgtgaaaacgcggcaccgagtcggtgcattcatcataggaaacaccaaagatgatattttctttaatggtgccaggcataatccaggaaaaccgcggttctatctagttacgcgttaaaccaactagaa

SEQ ID NO: 2315 - RNA, 20 nt, synthetic construct
  source 1..20: mol_type = other RNA
agggtaaaattaagcacagt

SEQ ID NO: 2316 - RNA, 20 nt, synthetic construct
  source 1..20: mol_type = other RNA
atgggagaactggagccttc

SEQ ID NO: 2317 - RNA, 20 nt, synthetic construct
  source 1..20: mol_type = other RNA
attctgttctcagttttcct

SEQ ID NO: 2318 - RNA, 20 nt, synthetic construct
  source 1..20: mol_type = other RNA
gtaaaattaagcacagtgga

SEQ ID NO: 2319 - RNA, 20 nt, synthetic construct
  source 1..20: mol_type = other RNA
attaaagaaaatatcatctt

SEQ ID NO: 2320 - RNA, 20 nt, synthetic construct
  source 1..20: mol_type = other RNA
cattctgttctcagttttcc

SEQ ID NO: 2321 - RNA, 20 nt, synthetic construct
  source 1..20: mol_type = other RNA
gagggtaaaattaagcacag

SEQ ID NO: 2322 - RNA, 20 nt, synthetic construct
  source 1..20: mol_type = other RNA
agttttcctggattatgcca

SEQ ID NO: 2323 - RNA, 20 nt, synthetic construct
  source 1..20: mol_type = other RNA
atcaaagagaacatcatctt

SEQ ID NO: 2324 - RNA, 20 nt, synthetic construct
  source 1..20: mol_type = other RNA
atcaaagaaaatatcatctt

SEQ ID NO: 2325 - RNA, 20 nt, synthetic construct
  source 1..20: mol_type = other RNA
atcaaagagaatatcatctt

SEQ ID NO: 2326 - RNA, 20 nt, synthetic construct
  source 1..20: mol_type = other RNA
attaaagaaaacatcatctt

SEQ ID NO: 2327 - RNA, 20 nt, synthetic construct
  source 1..20: mol_type = other RNA
agttttcctggattatgccg

SEQ ID NO: 2328 - RNA, 20 nt, synthetic construct
  source 1..20: mol_type = other RNA
attaaagagaatatcatctt

SEQ ID NO: 2329 - RNA, 20 nt, synthetic construct
  source 1..20: mol_type = other RNA
atcaaagaaaatataatctt

SEQ ID NO: 2330 - RNA, 98 nt, synthetic construct
  source 1..98: mol_type = other RNA
gagggtaaaattaagcacaggtttaagagcggggaaatccgcaagtttaaataaggctagtccgttatcagcgtgaaaacgcggcaccgagtcggtgc

SEQ ID NO: 2331 - RNA, 98 nt, synthetic construct
  source 1..98: mol_type = other RNA
gtaaaattaagcacagtggagtttaagagcggggaaatccgcaagtttaaataaggctagtccgttatcagcgtgaaaacgcggcaccgagtcggtgc

SEQ ID NO: 2332 - RNA, 99 nt, synthetic construct
  source 1..99: mol_type = other RNA
gcattctgttctcagttttccgtttaagagcggggaaatccgcaagtttaaataaggctagtccgttatcagcgtgaaaacgcggcaccgagtcggtgc

SEQ ID NO: 2333 - RNA, 99 nt, synthetic construct
  source 1..99: mol_type = other RNA
gcagttttcctggattatgccgtttaagagcggggaaatccgcaagtttaaataaggctagtccgttatcagcgtgaaaacgcggcaccgagtcggtgc

SEQ ID NO: 2334 - RNA, 99 nt, synthetic construct
  source 1..99: mol_type = other RNA
gattaaagaaaatatcatcttgtttaagagcggggaaatccgcaagtttaaataaggctagtccgttatcagcgtgaaaacgcggcaccgagtcggtgc

SEQ ID NO: 2335 - RNA, 99 nt, synthetic construct
  source 1..99: mol_type = other RNA
gattctgttctcagttttcctgtttaagagcggggaaatccgcaagtttaaataaggctagtccgttatcagcgtgaaaacgcggcaccgagtcggtgc

SEQ ID NO: 2336 - RNA, 99 nt, synthetic construct
  source 1..99: mol_type = other RNA
gattatgcctggcaccattaagtttaagagcggggaaatccgcaagtttaaataaggctagtccgttatcagcgtgaaaacgcggcaccgagtcggtgc

SEQ ID NO: 2337 - RNA, 99 nt, synthetic construct
  source 1..99: mol_type = other RNA
gagggtaaaattaagcacagtgtttaagagcggggaaatccgcaagtttaaataaggctagtccgttatcagcgtgaaaacgcggcaccgagtcggtgc

SEQ ID NO: 2338 - RNA, 99 nt, synthetic construct
  source 1..99: mol_type = other RNA
gatgggagaactggagccttcgtttaagagcggggaaatccgcaagtttaaataaggctagtccgttatcagcgtgaaaacgcggcaccgagtcggtgc

SEQ ID NO: 2339 - RNA, 99 nt, synthetic construct
  source 1..99: mol_type = other RNA
gatcaaagaaaatataatcttgtttaagagcggggaaatccgcaagtttaaataaggctagtccgttatcagcgtgaaaacgcggcaccgagtcggtgc

SEQ ID NO: 2340 - RNA, 99 nt, synthetic construct
  source 1..99: mol_type = other RNA
gatcaaagaaaatatcatcttgtttaagagcggggaaatccgcaagtttaaataaggctagtccgttatcagcgtgaaaacgcggcaccgagtcggtgc

SEQ ID NO: 2341 - RNA, 99 nt, synthetic construct
  source 1..99: mol_type = other RNA
gatcaaagagaacatcatcttgtttaagagcggggaaatccgcaagtttaaataaggctagtccgttatcagcgtgaaaacgcggcaccgagtcggtgc

SEQ ID NO: 2342 - RNA, 99 nt, synthetic construct
  source 1..99: mol_type = other RNA
gatcaaagagaatatcatcttgtttaagagcggggaaatccgcaagtttaaataaggctagtccgttatcagcgtgaaaacgcggcaccgagtcggtgc

SEQ ID NO: 2343 - RNA, 99 nt, synthetic construct
  source 1..99: mol_type = other RNA
gattaaagaaaacatcatcttgtttaagagcggggaaatccgcaagtttaaataaggctagtccgttatcagcgtgaaaacgcggcaccgagtcggtgc

SEQ ID NO: 2344 - RNA, 99 nt, synthetic construct
  source 1..99: mol_type = other RNA
gattaaagagaatatcatcttgtttaagagcggggaaatccgcaagtttaaataaggctagtccgttatcagcgtgaaaacgcggcaccgagtcggtgc

SEQ ID NO: 2345 - RNA, 99 nt, synthetic construct
  source 1..99: mol_type = other RNA
gagttttcctggattatgccagtttaagagcggggaaatccgcaagtttaaataaggctagtccgttatcagcgtgaaaacgcggcaccgagtcggtgc

SEQ ID NO: 2346 - RNA, 99 nt, synthetic construct
  source 1..99: mol_type = other RNA
gagttttcctggattatgccggtttaagagcggggaaatccgcaagtttaaataaggctagtccgttatcagcgtgaaaacgcggcaccgagtcggtgc

SEQ ID NO: 2347-2355 - skipped (9 entries)

SEQ ID NO: 2356 - protein, 677 aa, Moloney murine leukemia virus
TLNIEDEHRLHETSKEPDVSLGSTWLSDFPQAWAETGGMGLAVRQAPLIIPLKATSTPVSIKQYPMSQEARLGIKPHIQRLLDQGILVPCQSPWNTPLLPVKKPGTNDYRPVQDLREVNKRVEDIHPTVPNPYNLLSGLPPSHQWYTVLDLKDAFFCLRLHPTSQPLFAFEWRDPEMGISGQLTWTRLPQGFKNSPTLFDEALHRDLADFRIQHPDLILLQYVDDLLLAATSELDCQQGTRALLQTLGNLGYRASAKKAQICQKQVKYLGYLLKEGQRWLTEARKETVMGQPTPKTPRQLREFLGTAGFCRLWIPGFAEMAAPLYPLTKTGTLFNWGPDQQKAYQEIKQALLTAPALGLPDLTKPFELFVDEKQGYAKGVLTQKLGPWRRPVAYLSKKLDPVAAGWPPCLRMVAAIAVLTKDAGKLTMGQPLVILAPHAVEALVKQPPDRWLSNARMTHYQALLLDTDRVQFGPVVALNPATLLPLPEEGLQHNCLDILAEAHGTRPDLTDQPLPDADHTWYTDGSSLLQEGQRKAGAAVTTETEVIWAKALPAGTSAQRAELIALTQALKMAEGKKLNVYTDSRYAFATAHIHGEIYRRRGLLTSEGKEIKNKDEILALLKALFLPKRLSIIHCPGHQKGHSAEARGNRMADQAARKAAITETPDTSTLLIENSSP

SEQ ID NO: 2357 - protein, 677 aa, synthetic construct
TLNIEDEYRLHETSKEPDVSLGSTWLSDFPQAWAETGGMGLAVRQAPLIIPLKATSTPVSIKQYPMSQEARLGIKPHIQRLLDQGILVPCQSPWNTPLLPVKKPGTNDYRPVQDLREVNKRVEDIHPTVPNPYNLLSGLPPSHQWYTVLDLKDAFFCLRLHPTSQPLFAFEWRDPEMGISGQLTWTRLPQGFKNSPTLFDEALHRDLADFRIQHPDLILLQYVDDLLLAATSELDCQQGTRALLQTLGNLGYRASAKKAQICQKQVKYLGYLLKEGQRWLTEARKETVMGQPTPKTPRQLREFLGTAGFCRLWIPGFAEMAAPLYPLTKTGTLFNWGPDQQKAYQEIKQALLTAPALGLPDLTKPFELFVDEKQGYAKGVLTQKLGPWRRPVAYLSKKLDPVAAGWPPCLRMVAAIAVLTKDAGKLTMGQPLVILAPHAVEALVKQPPDRWLSNARMTHYQALLLDTDRVQFGPVVALNPATLLPLPEEGLQHNCLDILAEAHGTRPDLTDQPLPDADHTWYTDGSSLLQEGQRKAGAAVTTETEVIWAKALPAGTSAQRAELIALTQALKMAEGKKLNVYTDSRYAFATAHIHGEIYRRRGLLTSEGKEIKNKDEILALLKALFLPKRLSIIHCPGHQKGHSAEARGNRMADQAARKAAITETPDTSTLLIENSSP

SEQ ID NO: 2358 - protein, 677 aa, synthetic construct
TLNIEDEYRLHETSKEPDVSLGSTWLSDFPQAWAETGGMGLAVRQAPLIIPLKATSTPVSIKQYPMSQEARLGIKPHIQRLLDQGILVPCQSPWNTPLLPVKKPGTNDYRPVQDLREVNKRVEDIHPTVPNPYNLLSGLPPSHQWYTVLDLKDAFFCLRLHPTSQPLFAFEWRDPEMGISGQLTWTRLPQGFKNSPTLFNEALHRDLADFRIQHPDLILLQYVDDLLLAATSELDCQQGTRALLQTLGNLGYRASAKKAQICQKQVKYLGYLLKEGQRWLTEARKETVMGQPTPKTPRQLREFLGKAGFCRLFIPGFAEMAAPLYPLTKPGTLFNWGPDQQKAYQEIKQALLTAPALGLPDLTKPFELFVDEKQGYAKGVLTQKLGPWRRPVAYLSKKLDPVAAGWPPCLRMVAAIAVLTKDAGKLTMGQPLVILAPHAVEALVKQPPDRWLSNARMTHYQALLLDTDRVQFGPVVALNPATLLPLPEEGLQHNCLDILAEAHGTRPDLTDQPLPDADHTWYTDGSSLLQEGQRKAGAAVTTETEVIWAKALPAGTSAQRAELIALTQALKMAEGKKLNVYTDSRYAFATAHIHGEIYRRRGWLTSEGKEIKNKDEILALLKALFLPKRLSIIHCPGHQKGHSAEARGNRMADQAARKAAITETPDTSTLLIENSSP

SEQ ID NO: 2359 - protein, 1368 aa, Streptococcus pyogenes [sequence omitted]

SEQ ID NO: 2360 - protein, 1368 aa, synthetic construct
MDKKYSIGLDIGTNSVGWAVITDEYKVPSKKFKVLGNTDRHSIKKNLIGALLFDSGETAEATRLKRTARRRYTRRKNRICYLQEIFSNEMAKVDDSFFHRLEESFLVEEDKKHERHPIFGNIVDEVAYHEKYPTIYHLRKKLVDSTDKADLRLIYLALAHMIKFRGHFLIEGDLNPDNSDVDKLFIQLVQTYNQLFEENPINASGVDAKAILSARLSKSRRLENLIAQLPGEKKNGLFGNLIALSLGLTPNFKSNFDLAEDAKLQLSKDTYDDDLDNLLAQIGDQYADLFLAAKNLSDAILLSDILRVNTEITKAPLSASMIKRYDEHHQDLTLLKALVRQQLPEKYKEIFFDQSKNGYAGYIDGGASQEEFYKFIKPILEKMDGTEELLVKLNREDLLRKQRTFDNGSIPHQIHLGELHAILRRQEDFYPFLKDNREKIEKILTFRIPYYVGPLARGNSRFAWMTRKSEETITPWNFEEVVDKGASAQSFIERMTNFDKNLPNEKVLPKHSLLYEYFTVYNELTKVKYVTEGMRKPAFLSGEQKKAIVDLLFKTNRKVTVKQLKEDYFKKIECFDSVEISGVEDRFNASLGTYHDLLKIIKDKDFLDNEENEDILEDIVLTLTLFEDREMIEERLKTYAHLFDDKVMKQLKRRRYTGWGRLSRKLINGIRDKQSGKTILDFLKSDGFANRNFMQLIHDDSLTFKEDIQKAQVSGQGDSLHEHIANLAGSPAIKKGILQTVKVVDELVKVMGRHKPENIVIEMARENQTTQKGQKNSRERMKRIEEGIKELGSQILKEHPVENTQLQNEKLYLYYLQNGRDMYVDQELDINRLSDYDVDAIVPQSFLKDDSIDNKVLTRSDKNRGKSDNVPSEEVVKKMKNYWRQLLNAKLITQRKFDNLTKAERGGLSELDKAGFIKRQLVETRQITKHVAQILDSRMNTKYDENDKLIREVKVITLKSKLVSDFRKDFQFYKVREINNYHHAHDAYLNAVVGTALIKKYPKLESEFVYGDYKVYDVRKMIAKSEQEIGKATAKYFFYSNIMNFFKTEITLANGEIRKRPLIETNGETGEIVWDKGRDFATVRKVLSMPQVNIVKKTEVQTGGFSKESILPKRNSDKLIARKKDWDPKKYGGFDSPTVAYSVLVVAKVEKGKSKKLKSVKELLGITIMERSSFEKNPIDFLEAKGYKEVKKDLIIKLPKYSLFELENGRKRMLASAGELQKGNELALPSKYVNFLYLASHYEKLKGSPEDNEQKQLFVEQHKHYLDEIIEQISEFSKRVILADANLDKVLSAYNKHRDKPIREQAENIIHLFTLTNLGAPAAFKYFDTTIDRKRYTSTKEVLDATLIHQSITGLYETRIDLSQLGGD

SEQ ID NO: 2361 - protein, 1367 aa, synthetic construct
DKKYSIGLDIGTNSVGWAVITDEYKVPSKKFKVLGNTDRHSIKKNLIGALLFDSGETAEATRLKRTARRRYTRRKNRICYLQEIFSNEMAKVDDSFFHRLEESFLVEEDKKHERHPIFGNIVDEVAYHEKYPTIYHLRKKLVDSTDKADLRLIYLALAHMIKFRGHFLIEGDLNPDNSDVDKLFIQLVQTYNQLFEENPINASGVDAKAILSARLSKSRRLENLIAQLPGEKKNGLFGNLIALSLGLTPNFKSNFDLAEDAKLQLSKDTYDDDLDNLLAQIGDQYADLFLAAKNLSDAILLSDILRVNTEITKAPLSASMIKRYDEHHQDLTLLKALVRQQLPEKYKEIFFDQSKNGYAGYIDGGASQEEFYKFIKPILEKMDGTEELLVKLNREDLLRKQRTFDNGSIPHQIHLGELHAILRRQEDFYPFLKDNREKIEKILTFRIPYYVGPLARGNSRFAWMTRKSEETITPWNFEEVVDKGASAQSFIERMTNFDKNLPNEKVLPKHSLLYEYFTVYNELTKVKYVTEGMRKPAFLSGEQKKAIVDLLFKTNRKVTVKQLKEDYFKKIECFDSVEISGVEDRFNASLGTYHDLLKIIKDKDFLDNEENEDILEDIVLTLTLFEDREMIEERLKTYAHLFDDKVMKQLKRRRYTGWGRLSRKLINGIRDKQSGKTILDFLKSDGFANRNFMQLIHDDSLTFKEDIQKAQVSGQGDSLHEHIANLAGSPAIKKGILQTVKVVDELVKVMGRHKPENIVIEMARENQTTQKGQKNSRERMKRIEEGIKELGSQILKEHPVENTQLQNEKLYLYYLQNGRDMYVDQELDINRLSDYDVDAIVPQSFLKDDSIDNKVLTRSDKNRGKSDNVPSEEVVKKMKNYWRQLLNAKLITQRKFDNLTKAERGGLSELDKAGFIKRQLVETRQITKHVAQILDSRMNTKYDENDKLIREVKVITLKSKLVSDFRKDFQFYKVREINNYHHAHDAYLNAVVGTALIKKYPKLESEFVYGDYKVYDVRKMIAKSEQEIGKATAKYFFYSNIMNFFKTEITLANGEIRKRPLIETNGETGEIVWDKGRDFATVRKVLSMPQVNIVKKTEVQTGGFSKESILPKRNSDKLIARKKDWDPKKYGGFDSPTVAYSVLVVAKVEKGKSKKLKSVKELLGITIMERSSFEKNPIDFLEAKGYKEVKKDLIIKLPKYSLFELENGRKRMLASAGELQKGNELALPSKYVNFLYLASHYEKLKGSPEDNEQKQLFVEQHKHYLDEIIEQISEFSKRVILADANLDKVLSAYNKHRDKPIREQAENIIHLFTLTNLGAPAAFKYFDTTIDRKRYTSTKEVLDATLIHQSITGLYETRIDLSQLGGD

SEQ ID NO: 2362 - protein, 1367 aa, synthetic construct
DKKYSIGLDIGTNSVGWAVITDEYKVPSKKFKVLGNTDRHSIKKNLIGALLFDSGETAEATRLKRTARRRYTRRKNRICYLQEIFSNEMAKVDDSFFHRLEESFLVEEDKKHERHPIFGNIVDEVAYHEKYPTIYHLRKKLVDSTDKADLRLIYLALAHMIKFRGHFLIEGDLNPDNSDVDKLFIQLVQTYNQLFEENPINASGVDAKAILSARLSKSRKLENLIAQLPGEKKNGLFGNLIALSLGLTPNFKSNFDLAEDAKLQLSKDTYDDDLDNLLAQIGDQYADLFLAAKNLSDAILLSDILRVNTEITKAPLSASMIKRYDEHHQDLTLLKALVRQQLPEKYKEIFFDQSKNGYAGYIDGGASQEEFYKFIKPILEKMDGTEELLVKLKREDLLRKQRTFDNGSIPHQIHLGELHAILRRQEDFYPFLKDNREKIEKILTFRIPYYVGPLARGNSRFAWMTRKSEETITPWNFEEVVDKGASAQSFIERMTNFDKNLPNEKVLPKHSLLYEYFTVYNELTKVKYVTEGMRKPAFLSGEQKKAIVDLLFKTNRKVTVKQLKEDYFKKIECFDSVEISGVEDRFNASLGTYHDLLKIIKDKDFLDNEENEDILEDIVLTLTLFEDREMIEERLKTYAHLFDDKVMKQLKRRRYTGWGRLSRKLINGIRDKQSGKTILDFLKSDGFANRNFMQLIHDDSLTFKEDIQKAQVSGQGDSLHEHIANLAGSPAIKKGILQTVKVVDELVKVMGRHKPENIVIEMARENQTTQKGQKNSRERMKRIEEGIKELGSQILKEHPVENTQLQNEKLYLYYLQNGRDMYVDQELDINRLSDYDVDAIVPQSFLKDDSIDNKVLTRSDKNRGKSDNVPSEEVVKKMKNYWRQLLNAKLITQRKFDNLTKAERGGLSELDKAGFIKRQLVETRQITKHVAQILDSRMNTKYDENDKLIREVKVITLKSKLVSDFRKDFQFYKVREINNYHHAHDAYLNAVVGTALIKKYPKLESEFVYGDYKVYDVRKMIAKSEQEIGKATAKYFFYSNIMNFFKTEITLANGEIRKRPLIETNGETGEIVWDKGRDFATVRKVLSMPQVNIVKKTEVQTGGFSKESILPKRNSDKLIARKKDWDPKKYGGFDSPTVAYSVLVVAKVEKGKSKKLKSVKELLGITIMERSSFEKNPIDFLEAKGYKEVKKDLIIKLPKYSLFELENGRKRMLASAGELQKGNELALPSKYVNFLYLASHYEKLKGSPEDNEQKQLFVEQHKHYLDEIIEQISEFSKRVILADANLDKVLSAYNKHRDKPIREQAENIIHLFTLTNLGAPAAFKYFDTTIDRKRYTSTKEVLDATLIHQSITGLYETRIDLSQLGGD

SEQ ID NO: 2363 - protein, 1054 aa, Staphylococcus lugdunensis
MNQKFILGLDIGITSVGYGLIDYETKNIIDAGVRLFPEANVENNEGRRSKRGSRRLKRRRIHRLERVKKLLEDYNLLDQSQIPQSTNPYAIRVKGLSEALSKDELVIALLHIAKRRGIHKIDVIDSNDDVGNELSTKEQLNKNSKLLKDKFVCQIQLERMNEGQVRGEKNRFKTADIIKEIIQLLNVQKNFHQLDENFINKYIELVEMRREYFEGPGKGSPYGWEGDPKAWYETLMGHCTYFPDELRSVKYAYSADLFNALNDLNNLVIQRDGLSKLEYHEKYHIIENVFKQKKKPTLKQIANEINVNPEDIKGYRITKSGKPQFTEFKLYHDLKSVLFDQSILENEDVLDQIAEILTIYQDKDSIKSKLTELDILLNEEDKENIAQLTGYTGTHRLSLKCIRLVLEEQWYSSRNQMEIFTHLNIKPKKINLTAANKIPKAMIDEFILSPVVKRTFGQAINLINKIIEKYGVPEDIIIELARENNSKDKQKFINEMQKKNENTRKRINEIIGKYGNQNAKRLVEKIRLHDEQEGKCLYSLESIPLEDLLNNPNHYEVDHIIPRSVSFDNSYHNKVLVKQSENSKKSNLTPYQYFNSGKSKLSYNQFKQHILNLSKSQDRISKKKKEYLLEERDINKFEVQKEFINRNLVDTRYATRELTNYLKAYFSANNMNVKVKTINGSFTDYLRKVWKFKKERNHGYKHHAEDALIIANADFLFKENKKLKAVNSVLEKPEIESKQLDIQVDSEDNYSEMFIIPKQVQDIKDFRNFKYSHRVDKKPNRQLINDTLYSTRKKDNSTYIVQTIKDIYAKDNTTLKKQFDKSPEKFLMYQHDPRTFEKLEVIMKQYANEKNPLAKYHEETGEYLTKYSKKNNGPIVKSLKYIGNKLGSHLDVTHQFKSSTKKLVKLSIKPYRFDVYLTDKGYKFITISYLDVLKKDNYYYIPEQKYDKLKLGKAIDKNAKFIASFYKNDLIKLDGEIYKIIGVNSDTRNMIELDLPDIRYKEYCELNNIKGEPRIKKTIGKKVNSIEKLTTDVLGNVFTNTQYTKPQLLFKRGN

SEQ ID NO: 2364 - protein, 1054 aa, synthetic construct
MNQKFILGLDIGITSVGYGLIDYETKNIIDAGVRLFPEANVENNEGRRSKRGSRRLKRRRIHRLERVKKLLEDYNLLDQSQIPQSTNPYAIRVKGLSEALSKDELVIALLHIAKRRGIHKIDVIDSNDDVGNELSTKEQLNKNSKLLKDKFVCQIQLERMNEGQVRGEKNRFKTADIIKEIIQLLNVQKNFHQLDENFINKYIELVEMRREYFEGPGKGSPYGWEGDPKAWYETLMGHCTYFPDELRSVKYAYSADLFNALNDLNNLVIQRDGLSKLEYHEKYHIIENVFKQKKKPTLKQIANEINVNPEDIKGYRITKSGKPQFTEFKLYHDLKSVLFDQSILENEDVLDQIAEILTIYQDKDSIKSKLTELDILLNEEDKENIAQLTGYTGTHRLSLKCIRLVLEEQWYSSRNQMEIFTHLNIKPKKINLTAANKIPKAMIDEFILSPVVKRTFGQAINLINKIIEKYGVPEDIIIELARENNSKDKQKFINEMQKKNENTRKRINEIIGKYGNQNAKRLVEKIRLHDEQEGKCLYSLESIPLEDLLNNPNHYEVDHIIPRSVSFDNSYHNKVLVKQSEASKKSNLTPYQYFNSGKSKLSYNQFKQHILNLSKSQDRISKKKKEYLLEERDINKFEVQKEFINRNLVDTRYATRELTNYLKAYFSANNMNVKVKTINGSFTDYLRKVWKFKKERNHGYKHHAEDALIIANADFLFKENKKLKAVNSVLEKPEIESKQLDIQVDSEDNYSEMFIIPKQVQDIKDFRNFKYSHRVDKKPNRQLINDTLYSTRKKDNSTYIVQTIKDIYAKDNTTLKKQFDKSPEKFLMYQHDPRTFEKLEVIMKQYANEKNPLAKYHEETGEYLTKYSKKNNGPIVKSLKYIGNKLGSHLDVTHQFKSSTKKLVKLSIKPYRFDVYLTDKGYKFITISYLDVLKKDNYYYIPEQKYDKLKLGKAIDKNAKFIASFYKNDLIKLDGEIYKIIGVNSDTRNMIELDLPDIRYKEYCELNNIKGEPRIKKTIGKKVNSIEKLTTDVLGNVFTNTQYTKPQLLFKRGN

SEQ ID NO: 2365 - protein, 1053 aa, synthetic construct
NQKFILGLDIGITSVGYGLIDYETKNIIDAGVRLFPEANVENNEGRRSKRGSRRLKRRRIHRLERVKKLLEDYNLLDQSQIPQSTNPYAIRVKGLSEALSKDELVIALLHIAKRRGIHKIDVIDSNDDVGNELSTKEQLNKNSKLLKDKFVCQIQLERMNEGQVRGEKNRFKTADIIKEIIQLLNVQKNFHQLDENFINKYIELVEMRREYFEGPGKGSPYGWEGDPKAWYETLMGHCTYFPDELRSVKYAYSADLFNALNDLNNLVIQRDGLSKLEYHEKYHIIENVFKQKKKPTLKQIANEINVNPEDIKGYRITKSGKPQFTEFKLYHDLKSVLFDQSILENEDVLDQIAEILTIYQDKDSIKSKLTELDILLNEEDKENIAQLTGYTGTHRLSLKCIRLVLEEQWYSSRNQMEIFTHLNIKPKKINLTAANKIPKAMIDEFILSPVVKRTFGQAINLINKIIEKYGVPEDIIIELARENNSKDKQKFINEMQKKNENTRKRINEIIGKYGNQNAKRLVEKIRLHDEQEGKCLYSLESIPLEDLLNNPNHYEVDHIIPRSVSFDNSYHNKVLVKQSEASKKSNLTPYQYFNSGKSKLSYNQFKQHILNLSKSQDRISKKKKEYLLEERDINKFEVQKEFINRNLVDTRYATRELTNYLKAYFSANNMNVKVKTINGSFTDYLRKVWKFKKERNHGYKHHAEDALIIANADFLFKENKKLKAVNSVLEKPEIESKQLDIQVDSEDNYSEMFIIPKQVQDIKDFRNFKYSHRVDKKPNRQLINDTLYSTRKKDNSTYIVQTIKDIYAKDNTTLKKQFDKSPEKFLMYQHDPRTFEKLEVIMKQYANEKNPLAKYHEETGEYLTKYSKKNNGPIVKSLKYIGNKLGSHLDVTHQFKSSTKKLVKLSIKPYRFDVYLTDKGYKFITISYLDVLKKDNYYYIPEQKYDKLKLGKAIDKNAKFIASFYKNDLIKLDGEIYKIIGVNSDTRNMIELDLPDIRYKEYCELNNIKGEPRIKKTIGKKVNSIEKLTTDVLGNVFTNTQYTKPQLLFKRGN

SEQ ID NO: 2366 - protein, 1053 aa, Staphylococcus aureus
MKRNYILGLDIGITSVGYGIIDYETRDVIDAGVRLFKEANVENNEGRRSKRGARRLKRRRRHRIQRVKKLLFDYNLLTDHSELSGINPYEARVKGLSQKLSEEEFSAALLHLAKRRGVHNVNEVEEDTGNELSTKEQISRNSKALEEKYVAELQLERLKKDGEVRGSINRFKTSDYVKEAKQLLKVQKAYHQLDQSFIDTYIDLLETRRTYYEGPGEGSPFGWKDIKEWYEMLMGHCTYFPEELRSVKYAYNADLYNALNDLNNLVITRDENEKLEYYEKFQIIENVFKQKKKPTLKQIAKEILVNEEDIKGYRVTSTGKPEFTNLKVYHDIKDITARKEIIENAELLDQIAKILTIYQSSEDIQEELTNLNSELTQEEIEQISNLKGYTGTHNLSLKAINLILDELWHTNDNQIAIFNRLKLVPKKVDLSQQKEIPTTLVDDFILSPVVKRSFIQSIKVINAIIKKYGLPNDIIIELAREKNSKDAQKMINEMQKRNRQTNERIEEIIRTTGKENAKYLIEKIKLHDMQEGKCLYSLEAIPLEDLLNNPFNYEVDHIIPRSVSFDNSFNNKVLVKQEENSKKGNRTPFQYLSSSDSKISYETFKKHILNLAKGKGRISKTKKEYLLEERDINRFSVQKDFINRNLVDTRYATRGLMNLLRSYFRVNNLDVKVKSINGGFTSFLRRKWKFKKERNKGYKHHAEDALIIANADFIFKEWKKLDKAKKVMENQMFEEKQAESMPEIETEQEYKEIFITPHQIKHIKDFKDYKYSHRVDKKPNRELINDTLYSTRKDDKGNTLIVNNLNGLYDKDNDKLKKLINKSPEKLLMYHHDPQTYQKLKLIMEQYGDEKNPLYKYYEETGNYLTKYSKKDNGPVIKKIKYYGNKLNAHLDITDDYPNSRNKVVKLSLKPYRFDVYLDNGVYKFVTVKNLDVIKKENYYEVNSKCYEEAKKLKKISNQAEFIASFYNNDLIKINGELYRVIGVNNDLLNRIEVNMIDITYREYLENMNDKRPPRIIKTIASKTQSIKKYSTDILGNLYEVKSKKHPQIIKKG

SEQ ID NO: 2367 - protein, 1053 aa, synthetic construct
MKRNYILGLDIGITSVGYGIIDYETRDVIDAGVRLFKEANVENNEGRRSKRGARRLKRRRRHRIQRVKKLLFDYNLLTDHSELSGINPYEARVKGLSQKLSEEEFSAALLHLAKRRGVHNVNEVEEDTGNELSTKEQISRNSKALEEKYVAELQLERLKKDGEVRGSINRFKTSDYVKEAKQLLKVQKAYHQLDQSFIDTYIDLLETRRTYYEGPGEGSPFGWKDIKEWYEMLMGHCTYFPEELRSVKYAYNADLYNALNDLNNLVITRDENEKLEYYEKFQIIENVFKQKKKPTLKQIAKEILVNEEDIKGYRVTSTGKPEFTNLKVYHDIKDITARKEIIENAELLDQIAKILTIYQSSEDIQEELTNLNSELTQEEIEQISNLKGYTGTHNLSLKAINLILDELWHTNDNQIAIFNRLKLVPKKVDLSQQKEIPTTLVDDFILSPVVKRSFIQSIKVINAIIKKYGLPNDIIIELAREKNSKDAQKMINEMQKRNRQTNERIEEIIRTTGKENAKYLIEKIKLHDMQEGKCLYSLEAIPLEDLLNNPFNYEVDHIIPRSVSFDNSFNNKVLVKQEEASKKGNRTPFQYLSSSDSKISYETFKKHILNLAKGKGRISKTKKEYLLEERDINRFSVQKDFINRNLVDTRYATRGLMNLLRSYFRVNNLDVKVKSINGGFTSFLRRKWKFKKERNKGYKHHAEDALIIANADFIFKEWKKLDKAKKVMENQMFEEKQAESMPEIETEQEYKEIFITPHQIKHIKDFKDYKYSHRVDKKPNRELINDTLYSTRKDDKGNTLIVNNLNGLYDKDNDKLKKLINKSPEKLLMYHHDPQTYQKLKLIMEQYGDEKNPLYKYYEETGNYLTKYSKKDNGPVIKKIKYYGNKLNAHLDITDDYPNSRNKVVKLSLKPYRFDVYLDNGVYKFVTVKNLDVIKKENYYEVNSKCYEEAKKLKKISNQAEFIASFYNNDLIKINGELYRVIGVNNDLLNRIEVNMIDITYREYLENMNDKRPPRIIKTIASKTQSIKKYSTDILGNLYEVKSKKHPQIIKKG

SEQ ID NO: 2368 - protein, 1052 aa, synthetic construct
KRNYILGLDIGITSVGYGIIDYETRDVIDAGVRLFKEANVENNEGRRSKRGARRLKRRRRHRIQRVKKLLFDYNLLTDHSELSGINPYEARVKGLSQKLSEEEFSAALLHLAKRRGVHNVNEVEEDTGNELSTKEQISRNSKALEEKYVAELQLERLKKDGEVRGSINRFKTSDYVKEAKQLLKVQKAYHQLDQSFIDTYIDLLETRRTYYEGPGEGSPFGWKDIKEWYEMLMGHCTYFPEELRSVKYAYNADLYNALNDLNNLVITRDENEKLEYYEKFQIIENVFKQKKKPTLKQIAKEILVNEEDIKGYRVTSTGKPEFTNLKVYHDIKDITARKEIIENAELLDQIAKILTIYQSSEDIQEELTNLNSELTQEEIEQISNLKGYTGTHNLSLKAINLILDELWHTNDNQIAIFNRLKLVPKKVDLSQQKEIPTTLVDDFILSPVVKRSFIQSIKVINAIIKKYGLPNDIIIELAREKNSKDAQKMINEMQKRNRQTNERIEEIIRTTGKENAKYLIEKIKLHDMQEGKCLYSLEAIPLEDLLNNPFNYEVDHIIPRSVSFDNSFNNKVLVKQEEASKKGNRTPFQYLSSSDSKISYETFKKHILNLAKGKGRISKTKKEYLLEERDINRFSVQKDFINRNLVDTRYATRGLMNLLRSYFRVNNLDVKVKSINGGFTSFLRRKWKFKKERNKGYKHHAEDALIIANADFIFKEWKKLDKAKKVMENQMFEEKQAESMPEIETEQEYKEIFITPHQIKHIKDFKDYKYSHRVDKKPNRELINDTLYSTRKDDKGNTLIVNNLNGLYDKDNDKLKKLINKSPEKLLMYHHDPQTYQKLKLIMEQYGDEKNPLYKYYEETGNYLTKYSKKDNGPVIKKIKYYGNKLNAHLDITDDYPNSRNKVVKLSLKPYRFDVYLDNGVYKFVTVKNLDVIKKENYYEVNSKCYEEAKKLKKISNQAEFIASFYNNDLIKINGELYRVIGVNNDLLNRIEVNMIDITYREYLENMNDKRPPRIIKTIASKTQSIKKYSTDILGNLYEVKSKKHPQIIKKG

SEQ ID NO: 2369 - protein, 1368 aa, synthetic construct
MDKKYSIGLDIGTNSVGWAVITDEYKVPSKKFKVLGNTDRHSIKKNLIGALLFDSGETAEATRLKRTARRRYTRRKNRICYLQEIFSNEMAKVDDSFFHRLEESFLVEEDKKHERHPIFGNIVDEVAYHEKYPTIYHLRKKLVDSTDKADLRLIYLALAHMIKFRGHFLIEGDLNPDNSDVDKLFIQLVQTYNQLFEENPINASGVDAKAILSARLSKSRRLENLIAQLPGEKKNGLFGNLIALSLGLTPNFKSNFDLAEDAKLQLSKDTYDDDLDNLLAQIGDQYADLFLAAKNLSDAILLSDILRVNTEITKAPLSASMIKRYDEHHQDLTLLKALVRQQLPEKYKEIFFDQSKNGYAGYIDGGASQEEFYKFIKPILEKMDGTEELLVKLNREDLLRKQRTFDNGSIPHQIHLGELHAILRRQEDFYPFLKDNREKIEKILTFRIPYYVGPLARGNSRFAWMTRKSEETITPWNFEEVVDKGASAQSFIERMTNFDKNLPNEKVLPKHSLLYEYFTVYNELTKVKYVTEGMRKPAFLSGEQKKAIVDLLFKTNRKVTVKQLKEDYFKKIECFDSVEISGVEDRFNASLGTYHDLLKIIKDKDFLDNEENEDILEDIVLTLTLFEDREMIEERLKTYAHLFDDKVMKQLKRRRYTGWGRLSRKLINGIRDKQSGKTILDFLKSDGFANRNFMQLIHDDSLTFKEDIQKAQVSGQGDSLHEHIANLAGSPAIKKGILQTVKVVDELVKVMGRHKPENIVIEMARENQTTQKGQKNSRERMKRIEEGIKELGSQILKEHPVENTQLQNEKLYLYYLQNGRDMYVDQELDINRLSDYDVDHIVPQSFLKDDSIDNKVLTRSDKNRGKSDNVPSEEVVKKMKNYWRQLLNAKLITQRKFDNLTKAERGGLSELDKAGFIKRQLVETRQITKHVAQILDSRMNTKYDENDKLIREVKVITLKSKLVSDFRKDFQFYKVREINNYHHAHDAYLNAVVGTALIKKYPKLESEFVYGDYKVYDVRKMIAKSEQEIGKATAKYFFYSNIMNFFKTEITLANGEIRKRPLIETNGETGEIVWDKGRDFATVRKVLSMPQVNIVKKTEVQTGGFSKESIRPKRNSDKLIARKKDWDPKKYGGFVSPTVAYSVLVVAKVEKGKSKKLKSVKELLGITIMERSSFEKNPIDFLEAKGYKEVKKDLIIKLPKYSLFELENGRKRMLASARFLQKGNELALPSKYVNFLYLASHYEKLKGSPEDNEQKQLFVEQHKHYLDEIIEQISEFSKRVILADANLDKVLSAYNKHRDKPIREQAENIIHLFTLTNLGAPRAFKYFDTTIDRKVYRSTKEVLDATLIHQSITGLYETRIDLSQLGGD

SEQ ID NO: 2370 - protein, 1368 aa, synthetic construct
MDKKYSIGLDIGTNSVGWAVITDEYKVPSKKFKVLGNTDRHSIKKNLIGALLFDSGETAEATRLKRTARRRYTRRKNRICYLQEIFSNEMAKVDDSFFHRLEESFLVEEDKKHERHPIFGNIVDEVAYHEKYPTIYHLRKKLVDSTDKADLRLIYLALAHMIKFRGHFLIEGDLNPDNSDVDKLFIQLVQTYNQLFEENPINASGVDAKAILSARLSKSRRLENLIAQLPGEKKNGLFGNLIALSLGLTPNFKSNFDLAEDAKLQLSKDTYDDDLDNLLAQIGDQYADLFLAAKNLSDAILLSDILRVNTEITKAPLSASMIKRYDEHHQDLTLLKALVRQQLPEKYKEIFFDQSKNGYAGYIDGGASQEEFYKFIKPILEKMDGTEELLVKLNREDLLRKQRTFDNGSIPHQIHLGELHAILRRQEDFYPFLKDNREKIEKILTFRIPYYVGPLARGNSRFAWMTRKSEETITPWNFEEVVDKGASAQSFIERMTNFDKNLPNEKVLPKHSLLYEYFTVYNELTKVKYVTEGMRKPAFLSGEQKKAIVDLLFKTNRKVTVKQLKEDYFKKIECFDSVEISGVEDRFNASLGTYHDLLKIIKDKDFLDNEENEDILEDIVLTLTLFEDREMIEERLKTYAHLFDDKVMKQLKRRRYTGWGRLSRKLINGIRDKQSGKTILDFLKSDGFANRNFMQLIHDDSLTFKEDIQKAQVSGQGDSLHEHIANLAGSPAIKKGILQTVKVVDELVKVMGRHKPENIVIEMARENQTTQKGQKNSRERMKRIEEGIKELGSQILKEHPVENTQLQNEKLYLYYLQNGRDMYVDQELDINRLSDYDVDAIVPQSFLKDDSIDNKVLTRSDKNRGKSDNVPSEEVVKKMKNYWRQLLNAKLITQRKFDNLTKAERGGLSELDKAGFIKRQLVETRQITKHVAQILDSRMNTKYDENDKLIREVKVITLKSKLVSDFRKDFQFYKVREINNYHHAHDAYLNAVVGTALIKKYPKLESEFVYGDYKVYDVRKMIAKSEQEIGKATAKYFFYSNIMNFFKTEITLANGEIRKRPLIETNGETGEIVWDKGRDFATVRKVLSMPQVNIVKKTEVQTGGFSKESIRPKRNSDKLIARKKDWDPKKYGGFVSPTVAYSVLVVAKVEKGKSKKLKSVKELLGITIMERSSFEKNPIDFLEAKGYKEVKKDLIIKLPKYSLFELENGRKRMLASARFLQKGNELALPSKYVNFLYLASHYEKLKGSPEDNEQKQLFVEQHKHYLDEIIEQISEFSKRVILADANLDKVLSAYNKHRDKPIREQAENIIHLFTLTNLGAPRAFKYFDTTIDRKVYRSTKEVLDATLIHQSITGLYETRIDLSQLGGD

SEQ ID NO: 2371 - protein, 1367 aa, synthetic construct
DKKYSIGLDIGTNSVGWAVITDEYKVPSKKFKVLGNTDRHSIKKNLIGALLFDSGETAEATRLKRTARRRYTRRKNRICYLQEIFSNEMAKVDDSFFHRLEESFLVEEDKKHERHPIFGNIVDEVAYHEKYPTIYHLRKKLVDSTDKADLRLIYLALAHMIKFRGHFLIEGDLNPDNSDVDKLFIQLVQTYNQLFEENPINASGVDAKAILSARLSKSRRLENLIAQLPGEKKNGLFGNLIALSLGLTPNFKSNFDLAEDAKLQLSKDTYDDDLDNLLAQIGDQYADLFLAAKNLSDAILLSDILRVNTEITKAPLSASMIKRYDEHHQDLTLLKALVRQQLPEKYKEIFFDQSKNGYAGYIDGGASQEEFYKFIKPILEKMDGTEELLVKLNREDLLRKQRTFDNGSIPHQIHLGELHAILRRQEDFYPFLKDNREKIEKILTFRIPYYVGPLARGNSRFAWMTRKSEETITPWNFEEVVDKGASAQSFIERMTNFDKNLPNEKVLPKHSLLYEYFTVYNELTKVKYVTEGMRKPAFLSGEQKKAIVDLLFKTNRKVTVKQLKEDYFKKIECFDSVEISGVEDRFNASLGTYHDLLKIIKDKDFLDNEENEDILEDIVLTLTLFEDREMIEERLKTYAHLFDDKVMKQLKRRRYTGWGRLSRKLINGIRDKQSGKTILDFLKSDGFANRNFMQLIHDDSLTFKEDIQKAQVSGQGDSLHEHIANLAGSPAIKKGILQTVKVVDELVKVMGRHKPENIVIEMARENQTTQKGQKNSRERMKRIEEGIKELGSQILKEHPVENTQLQNEKLYLYYLQNGRDMYVDQELDINRLSDYDVDAIVPQSFLKDDSIDNKVLTRSDKNRGKSDNVPSEEVVKKMKNYWRQLLNAKLITQRKFDNLTKAERGGLSELDKAGFIKRQLVETRQITKHVAQILDSRMNTKYDENDKLIREVKVITLKSKLVSDFRKDFQFYKVREINNYHHAHDAYLNAVVGTALIKKYPKLESEFVYGDYKVYDVRKMIAKSEQEIGKATAKYFFYSNIMNFFKTEITLANGEIRKRPLIETNGETGEIVWDKGRDFATVRKVLSMPQVNIVKKTEVQTGGFSKESIRPKRNSDKLIARKKDWDPKKYGGFVSPTVAYSVLVVAKVEKGKSKKLKSVKELLGITIMERSSFEKNPIDFLEAKGYKEVKKDLIIKLPKYSLFELENGRKRMLASARFLQKGNELALPSKYVNFLYLASHYEKLKGSPEDNEQKQLFVEQHKHYLDEIIEQISEFSKRVILADANLDKVLSAYNKHRDKPIREQAENIIHLFTLTNLGAPRAFKYFDTTIDRKVYRSTKEVLDATLIHQSITGLYETRIDLSQLGGD

SEQ ID NO: 2372 - protein, 1368 aa, synthetic construct
MDKKYSIGLDIGTNSVGWAVITDEYKVPSKKFKVLGNTDRHSIKKNLIGALLFDSGETAEATRLKRTARRRYTRRKNRICYLQEIFSNEMAKVDDSFFHRLEESFLVEEDKKHERHPIFGNIVDEVAYHEKYPTIYHLRKKLVDSTDKADLRLIYLALAHMIKFRGHFLIEGDLNPDNSDVDKLFIQLVQTYNQLFEENPINASGVDAKAILSARLSKSRRLENLIAQLPGEKKNGLFGNLIALSLGLTPNFKSNFDLAEDAKLQLSKDTYDDDLDNLLAQIGDQYADLFLAAKNLSDAILLSDILRVNTEITKAPLSASMIKRYDEHHQDLTLLKALVRQQLPEKYKEIFFDQSKNGYAGYIDGGASQEEFYKFIKPILEKMDGTEELLVKLNREDLLRKQRTFDNGSIPHQIHLGELHAILRRQEDFYPFLKDNREKIEKILTFRIPYYVGPLARGNSRFAWMTRKSEETITPWNFEEVVDKGASAQSFIERMTNFDKNLPNEKVLPKHSLLYEYFTVYNELTKVKYVTEGMRKPAFLSGEQKKAIVDLLFKTNRKVTVKQLKEDYFKKIECFDSVEISGVEDRFNASLGTYHDLLKIIKDKDFLDNEENEDILEDIVLTLTLFEDREMIEERLKTYAHLFDDKVMKQLKRRRYTGWGRLSRKLINGIRDKQSGKTILDFLKSDGFANRNFMQLIHDDSLTFKEDIQKAQVSGQGDSLHEHIANLAGSPAIKKGILQTVKVVDELVKVMGRHKPENIVIEMARENQTTQKGQKNSRERMKRIEEGIKELGSQILKEHPVENTQLQNEKLYLYYLQNGRDMYVDQELDINRLSDYDVDHIVPQSFLKDDSIDNKVLTRSDKNRGKSDNVPSEEVVKKMKNYWRQLLNAKLITQRKFDNLTKAERGGLSELDKAGFIKRQLVETRQITKHVAQILDSRMNTKYDENDKLIREVKVITLKSKLVSDFRKDFQFYKVREINNYHHAHDAYLNAVVGTALIKKYPKLESEFVYGDYKVYDVRKMIAKSEQEIGKATAKYFFYSNIMNFFKTEITLANGEIRKRPLIETNGETGEIVWDKGRDFATVRKVLSMPQVNIVKKTEVQTGGFSKESILPKRNSDKLIARKKDWDPKKYGGFVSPTVAYSVLVVAKVEKGKSKKLKSVKELLGITIMERSSFEKNPIDFLEAKGYKEVKKDLIIKLPKYSLFELENGRKRMLASARELQKGNELALPSKYVNFLYLASHYEKLKGSPEDNEQKQLFVEQHKHYLDEIIEQISEFSKRVILADANLDKVLSAYNKHRDKPIREQAENIIHLFTLTNLGAPAAFKYFDTTIDRKQYRSTKEVLDATLIHQSITGLYETRIDLSQLGGD

SEQ ID NO: 2373 - protein, 1368 aa, synthetic construct
MDKKYSIGLDIGTNSVGWAVITDEYKVPSKKFKVLGNTDRHSIKKNLIGALLFDSGETAEATRLKRTARRRYTRRKNRICYLQEIFSNEMAKVDDSFFHRLEESFLVEEDKKHERHPIFGNIVDEVAYHEKYPTIYHLRKKLVDSTDKADLRLIYLALAHMIKFRGHFLIEGDLNPDNSDVDKLFIQLVQTYNQLFEENPINASGVDAKAILSARLSKSRRLENLIAQLPGEKKNGLFGNLIALSLGLTPNFKSNFDLAEDAKLQLSKDTYDDDLDNLLAQIGDQYADLFLAAKNLSDAILLSDILRVNTEITKAPLSASMIKRYDEHHQDLTLLKALVRQQLPEKYKEIFFDQSKNGYAGYIDGGASQEEFYKFIKPILEKMDGTEELLVKLNREDLLRKQRTFDNGSIPHQIHLGELHAILRRQEDFYPFLKDNREKIEKILTFRIPYYVGPLARGNSRFAWMTRKSEETITPWNFEEVVDKGASAQSFIERMTNFDKNLPNEKVLPKHSLLYEYFTVYNELTKVKYVTEGMRKPAFLSGEQKKAIVDLLFKTNRKVTVKQLKEDYFKKIECFDSVEISGVEDRFNASLGTYHDLLKIIKDKDFLDNEENEDILEDIVLTLTLFEDREMIEERLKTYAHLFDDKVMKQLKRRRYTGWGRLSRKLINGIRDKQSGKTILDFLKSDGFANRNFMQLIHDDSLTFKEDIQKAQVSGQGDSLHEHIANLAGSPAIKKGILQTVKVVDELVKVMGRHKPENIVIEMARENQTTQKGQKNSRERMKRIEEGIKELGSQILKEHPVENTQLQNEKLYLYYLQNGRDMYVDQELDINRLSDYDVDAIVPQSFLKDDSIDNKVLTRSDKNRGKSDNVPSEEVVKKMKNYWRQLLNAKLITQRKFDNLTKAERGGLSELDKAGFIKRQLVETRQITKHVAQILDSRMNTKYDENDKLIREVKVITLKSKLVSDFRKDFQFYKVREINNYHHAHDAYLNAVVGTALIKKYPKLESEFVYGDYKVYDVRKMIAKSEQEIGKATAKYFFYSNIMNFFKTEITLANGEIRKRPLIETNGETGEIVWDKGRDFATVRKVLSMPQVNIVKKTEVQTGGFSKESILPKRNSDKLIARKKDWDPKKYGGFVSPTVAYSVLVVAKVEKGKSKKLKSVKELLGITIMERSSFEKNPIDFLEAKGYKEVKKDLIIKLPKYSLFELENGRKRMLASARELQKGNELALPSKYVNFLYLASHYEKLKGSPEDNEQKQLFVEQHKHYLDEIIEQISEFSKRVILADANLDKVLSAYNKHRDKPIREQAENIIHLFTLTNLGAPAAFKYFDTTIDRKQYRSTKEVLDATLIHQSITGLYETRIDLSQLGGD

SEQ ID NO: 2374 - protein, 1367 aa, synthetic construct
DKKYSIGLDIGTNSVGWAVITDEYKVPSKKFKVLGNTDRHSIKKNLIGALLFDSGETAEATRLKRTARRRYTRRKNRICYLQEIFSNEMAKVDDSFFHRLEESFLVEEDKKHERHPIFGNIVDEVAYHEKYPTIYHLRKKLVDSTDKADLRLIYLALAHMIKFRGHFLIEGDLNPDNSDVDKLFIQLVQTYNQLFEENPINASGVDAKAILSARLSKSRRLENLIAQLPGEKKNGLFGNLIALSLGLTPNFKSNFDLAEDAKLQLSKDTYDDDLDNLLAQIGDQYADLFLAAKNLSDAILLSDILRVNTEITKAPLSASMIKRYDEHHQDLTLLKALVRQQLPEKYKEIFFDQSKNGYAGYIDGGASQEEFYKFIKPILEKMDGTEELLVKLNREDLLRKQRTFDNGSIPHQIHLGELHAILRRQEDFYPFLKDNREKIEKILTFRIPYYVGPLARGNSRFAWMTRKSEETITPWNFEEVVDKGASAQSFIERMTNFDKNLPNEKVLPKHSLLYEYFTVYNELTKVKYVTEGMRKPAFLSGEQKKAIVDLLFKTNRKVTVKQLKEDYFKKIECFDSVEISGVEDRFNASLGTYHDLLKIIKDKDFLDNEENEDILEDIVLTLTLFEDREMIEERLKTYAHLFDDKVMKQLKRRRYTGWGRLSRKLINGIRDKQSGKTILDFLKSDGFANRNFMQLIHDDSLTFKEDIQKAQVSGQGDSLHEHIANLAGSPAIKKGILQTVKVVDELVKVMGRHKPENIVIEMARENQTTQKGQKNSRERMKRIEEGIKELGSQILKEHPVENTQLQNEKLYLYYLQNGRDMYVDQELDINRLSDYDVDAIVPQSFLKDDSIDNKVLTRSDKNRGKSDNVPSEEVVKKMKNYWRQLLNAKLITQRKFDNLTKAERGGLSELDKAGFIKRQLVETRQITKHVAQILDSRMNTKYDENDKLIREVKVITLKSKLVSDFRKDFQFYKVREINNYHHAHDAYLNAVVGTALIKKYPKLESEFVYGDYKVYDVRKMIAKSEQEIGKATAKYFFYSNIMNFFKTEITLANGEIRKRPLIETNGETGEIVWDKGRDFATVRKVLSMPQVNIVKKTEVQTGGFSKESILPKRNSDKLIARKKDWDPKKYGGFVSPTVAYSVLVVAKVEKGKSKKLKSVKELLGITIMERSSFEKNPIDFLEAKGYKEVKKDLIIKLPKYSLFELENGRKRMLASARELQKGNELALPSKYVNFLYLASHYEKLKGSPEDNEQKQLFVEQHKHYLDEIIEQISEFSKRVILADANLDKVLSAYNKHRDKPIREQAENIIHLFTLTNLGAPAAFKYFDTTIDRKQYRSTKEVLDATLIHQSITGLYETRIDLSQLGGD

SEQ ID NO: 2375 - protein, 1368 aa, synthetic construct
MDKKYSIGLDIGTNSVGWAVITDEYKVPSKKFKVLGNTDRHSIKKNLIGALLFDSGETAERTRLKRTARRRYTRRKNRICYLQEIFSNEMAKVDDSFFHRLEESFLVEEDKKHERHPIFGNIVDEVAYHEKYPTIYHLRKKLVDSTDKADLRLIYLALAHMIKFRGHFLIEGDLNPDNSDVDKLFIQLVQTYNQLFEENPINASGVDAKAILSARLSKSRRLENLIAQLPGEKKNGLFGNLIALSLGLTPNFKSNFDLAEDAKLQLSKDTYDDDLDNLLAQIGDQYADLFLAAKNLSDAILLSDILRVNTEITKAPLSASMIKRYDEHHQDLTLLKALVRQQLPEKYKEIFFDQSKNGYAGYIDGGASQEEFYKFIKPILEKMDGTEELLVKLNREDLLRKQRTFDNGSIPHQIHLGELHAILRRQEDFYPFLKDNREKIEKILTFRIPYYVGPLARGNSRFAWMTRKSEETITPWNFEEVVDKGASAQSFIERMTNFDKNLPNEKVLPKHSLLYEYFTVYNELTKVKYVTEGMRKPAFLSGEQKKAIVDLLFKTNRKVTVKQLKEDYFKKIECFDSVEISGVEDRFNASLGTYHDLLKIIKDKDFLDNEENEDILEDIVLTLTLFEDREMIEERLKTYAHLFDDKVMKQLKRRRYTGWGRLSRKLINGIRDKQSGKTILDFLKSDGFANRNFMQLIHDDSLTFKEDIQKAQVSGQGDSLHEHIANLAGSPAIKKGILQTVKVVDELVKVMGRHKPENIVIEMARENQTTQKGQKNSRERMKRIEEGIKELGSQILKEHPVENTQLQNEKLYLYYLQNGRDMYVDQELDINRLSDYDVDHIVPQSFLKDDSIDNKVLTRSDKNRGKSDNVPSEEVVKKMKNYWRQLLNAKLITQRKFDNLTKAERGGLSELDKAGFIKRQLVETRQITKHVAQILDSRMNTKYDENDKLIREVKVITLKSKLVSDFRKDFQFYKVREINNYHHAHDAYLNAVVGTALIKKYPKLESEFVYGDYKVYDVRKMIAKSEQEIGKATAKYFFYSNIMNFFKTEITLANGEIRKRPLIETNGETGEIVWDKGRDFATVRKVLSMPQVNIVKKTEVQTGGFSKESIRPKRNSDKLIARKKDWDPKKYGGFLWPTVAYSVLVVAKVEKGKSKKLKSVKELLGITIMERSSFEKNPIDFLEAKGYKEVKKDLIIKLPKYSLFELENGRKRMLASAKQLQKGNELALPSKYVNFLYLASHYEKLKGSPEDNEQKQLFVEQHKHYLDEIIEQISEFSKRVILADANLDKVLSAYNKHRDKPIREQAENIIHLFTLTRLGAPRAFKYFDTTIDPKQYRSTKEVLDATLIHQSITGLYETRIDLSQLGGD

SEQ ID NO: 2376 - protein, 1368 aa, synthetic construct
MDKKYSIGLDIGTNSVGWAVITDEYKVPSKKFKVLGNTDRHSIKKNLIGALLFDSGETAERTRLKRTARRRYTRRKNRICYLQEIFSNEMAKVDDSFFHRLEESFLVEEDKKHERHPIFGNIVDEVAYHEKYPTIYHLRKKLVDSTDKADLRLIYLALAHMIKFRGHFLIEGDLNPDNSDVDKLFIQLVQTYNQLFEENPINASGVDAKAILSARLSKSRRLENLIAQLPGEKKNGLFGNLIALSLGLTPNFKSNFDLAEDAKLQLSKDTYDDDLDNLLAQIGDQYADLFLAAKNLSDAILLSDILRVNTEITKAPLSASMIKRYDEHHQDLTLLKALVRQQLPEKYKEIFFDQSKNGYAGYIDGGASQEEFYKFIKPILEKMDGTEELLVKLNREDLLRKQRTFDNGSIPHQIHLGELHAILRRQEDFYPFLKDNREKIEKILTFRIPYYVGPLARGNSRFAWMTRKSEETITPWNFEEVVDKGASAQSFIERMTNFDKNLPNEKVLPKHSLLYEYFTVYNELTKVKYVTEGMRKPAFLSGEQKKAIVDLLFKTNRKVTVKQLKEDYFKKIECFDSVEISGVEDRFNASLGTYHDLLKIIKDKDFLDNEENEDILEDIVLTLTLFEDREMIEERLKTYAHLFDDKVMKQLKRRRYTGWGRLSRKLINGIRDKQSGKTILDFLKSDGFANRNFMQLIHDDSLTFKEDIQKAQVSGQGDSLHEHIANLAGSPAIKKGILQTVKVVDELVKVMGRHKPENIVIEMARENQTTQKGQKNSRERMKRIEEGIKELGSQILKEHPVENTQLQNEKLYLYYLQNGRDMYVDQELDINRLSDYDVDAIVPQSFLKDDSIDNKVLTRSDKNRGKSDNVPSEEVVKKMKNYWRQLLNAKLITQRKFDNLTKAERGGLSELDKAGFIKRQLVETRQITKHVAQILDSRMNTKYDENDKLIREVKVITLKSKLVSDFRKDFQFYKVREINNYHHAHDAYLNAVVGTALIKKYPKLESEFVYGDYKVYDVRKMIAKSEQEIGKATAKYFFYSNIMNFFKTEITLANGEIRKRPLIETNGETGEIVWDKGRDFATVRKVLSMPQVNIVKKTEVQTGGFSKESIRPKRNSDKLIARKKDWDPKKYGGFLWPTVAYSVLVVAKVEKGKSKKLKSVKELLGITIMERSSFEKNPIDFLEAKGYKEVKKDLIIKLPKYSLFELENGRKRMLASAKQLQKGNELALPSKYVNFLYLASHYEKLKGSPEDNEQKQLFVEQHKHYLDEIIEQISEFSKRVILADANLDKVLSAYNKHRDKPIREQAENIIHLFTLTRLGAPRAFKYFDTTIDPKQYRSTKEVLDATLIHQSITGLYETRIDLSQLGGD

SEQ ID NO: 2377 - protein, 1367 aa, synthetic construct
DKKYSIGLDIGTNSVGWAVITDEYKVPSKKFKVLGNTDRHSIKKNLIGALLFDSGETAERTRLKRTARRRYTRRKNRICYLQEIFSNEMAKVDDSFFHRLEESFLVEEDKKHERHPIFGNIVDEVAYHEKYPTIYHLRKKLVDSTDKADLRLIYLALAHMIKFRGHFLIEGDLNPDNSDVDKLFIQLVQTYNQLFEENPINASGVDAKAILSARLSKSRRLENLIAQLPGEKKNGLFGNLIALSLGLTPNFKSNFDLAEDAKLQLSKDTYDDDLDNLLAQIGDQYADLFLAAKNLSDAILLSDILRVNTEITKAPLSASMIKRYDEHHQDLTLLKALVRQQLPEKYKEIFFDQSKNGYAGYIDGGASQEEFYKFIKPILEKMDGTEELLVKLNREDLLRKQRTFDNGSIPHQIHLGELHAILRRQEDFYPFLKDNREKIEKILTFRIPYYVGPLARGNSRFAWMTRKSEETITPWNFEEVVDKGASAQSFIERMTNFDKNLPNEKVLPKHSLLYEYFTVYNELTKVKYVTEGMRKPAFLSGEQKKAIVDLLFKTNRKVTVKQLKEDYFKKIECFDSVEISGVEDRFNASLGTYHDLLKIIKDKDFLDNEENEDILEDIVLTLTLFEDREMIEERLKTYAHLFDDKVMKQLKRRRYTGWGRLSRKLINGIRDKQSGKTILDFLKSDGFANRNFMQLIHDDSLTFKEDIQKAQVSGQGDSLHEHIANLAGSPAIKKGILQTVKVVDELVKVMGRHKPENIVIEMARENQTTQKGQKNSRERMKRIEEGIKELGSQILKEHPVENTQLQNEKLYLYYLQNGRDMYVDQELDINRLSDYDVDAIVPQSFLKDDSIDNKVLTRSDKNRGKSDNVPSEEVVKKMKNYWRQLLNAKLITQRKFDNLTKAERGGLSELDKAGFIKRQLVETRQITKHVAQILDSRMNTKYDENDKLIREVKVITLKSKLVSDFRKDFQFYKVREINNYHHAHDAYLNAVVGTALIKKYPKLESEFVYGDYKVYDVRKMIAKSEQEIGKATAKYFFYSNIMNFFKTEITLANGEIRKRPLIETNGETGEIVWDKGRDFATVRKVLSMPQVNIVKKTEVQTGGFSKESIRPKRNSDKLIARKKDWDPKKYGGFLWPTVAYSVLVVAKVEKGKSKKLKSVKELLGITIMERSSFEKNPIDFLEAKGYKEVKKDLIIKLPKYSLFELENGRKRMLASAKQLQKGNELALPSKYVNFLYLASHYEKLKGSPEDNEQKQLFVEQHKHYLDEIIEQISEFSKRVILADANLDKVLSAYNKHRDKPIREQAENIIHLFTLTRLGAPRAFKYFDTTIDPKQYRSTKEVLDATLIHQSITGLYETRIDLSQLGGD

SEQ ID NO: 2378 - protein, 1057 aa, synthetic construct
MNQKFILGLDIGITSVGYGLIDYETKNIIDAGVRLFPEANVENNEGRRSKRGSRRLKRRRIHRLERVKLLLTEYDLINKEQIPTSNNPYQIRVKGLSEILSKDELAIALLHLAKRRGIHNVDVAADKEETASDSLSTKDQINKNAKFLESRYVCELQKERLENEGHVRGVENRFLTKDIVREAKKIIDTQMQYYPEIDETFKEKYISLVETRREYFEGPGQGSPFGWNGDLKKWYEMLMGHCTYFPQELRSVKYAYSADLFNALNDLNNLIIQRDNSEKLEYHEKYHIIENVFKQKKKPTLKQIAKEIGVNPEDIKGYRITKSGTPEFTSFKLFHDLKKVVKDHAILDDIDLLNQIAEILTIYQDKDSIVAELGQLEYLMSEADKQSISELTGYTGTHSLSLKCMNMIIDELWHSSMNQMEVFTYLNMRPKKYELKGYQRIPTDMIDDAILSPVVKRTFIQSINVINKVIEKYGIPEDIIIELARENNSDDRKKFINNLQKKNEATRKRINEIIGQTGNQNAKRIVEKIRLHDQQEGKCLYSLESIPLEDLLNNPNHYEVDHIIPRSVSFDNSYHNKVLVKQSENSKKSNLTPYQYFNSGKSKLSYNQFKQHILNLSKSQDRISKKKKEYLLEERDINKFEVQKEFINRNLVDTRYATRELTNYLKAYFSANNMNVKVKTINGSFTDYLRKVWKFKKERNHGYKHHAEDALIIANADFLFKENKKLKAVNSVLEKPEIETKQLDIQVDSEDNYSEMFIIPKQVQDIKDFRNFKYSHRVDKKPNRQLINDTLYSTRKKDNSTYIVQTIKDIYAKDNTTLKKQFDKSPEKFLMYQHDPRTFEKLEVIMKQYANEKNPLAKYHEETGEYLTKYSKKNNGPIVKSLKYIGNKLGSHLDVTHQFKSSTKKLVKLSIKNYRFDVYLTEKGYKFVTIAYLNVFKKDNYYYIPKDKYQELKEKKKIKDTDQFIASFYKNDLIKLNGDLYKIIGVNSDDRNIIELDYYDIKYKDYCEINNIKGEPRIKKTIGKKTESIEKFTTDVLGNLYLHSTEKAPQLIFKRGL

SEQ ID NO: 2379 - protein, 1057 aa, synthetic construct
MNQKFILGLDIGITSVGYGLIDYETKNIIDAGVRLFPEANVENNEGRRSKRGSRRLKRRRIHRLERVKLLLTEYDLINKEQIPTSNNPYQIRVKGLSEILSKDELAIALLHLAKRRGIHNVDVAADKEETASDSLSTKDQINKNAKFLESRYVCELQKERLENEGHVRGVENRFLTKDIVREAKKIIDTQMQYYPEIDETFKEKYISLVETRREYFEGPGQGSPFGWNGDLKKWYEMLMGHCTYFPQELRSVKYAYSADLFNALNDLNNLIIQRDNSEKLEYHEKYHIIENVFKQKKKPTLKQIAKEIGVNPEDIKGYRITKSGTPEFTSFKLFHDLKKVVKDHAILDDIDLLNQIAEILTIYQDKDSIVAELGQLEYLMSEADKQSISELTGYTGTHSLSLKCMNMIIDELWHSSMNQMEVFTYLNMRPKKYELKGYQRIPTDMIDDAILSPVVKRTFIQSINVINKVIEKYGIPEDIIIELARENNSDDRKKFINNLQKKNEATRKRINEIIGQTGNQNAKRIVEKIRLHDQQEGKCLYSLESIPLEDLLNNPNHYEVDHIIPRSVSFDNSYHNKVLVKQSEASKKSNLTPYQYFNSGKSKLSYNQFKQHILNLSKSQDRISKKKKEYLLEERDINKFEVQKEFINRNLVDTRYATRELTNYLKAYFSANNMNVKVKTINGSFTDYLRKVWKFKKERNHGYKHHAEDALIIANADFLFKENKKLKAVNSVLEKPEIETKQLDIQVDSEDNYSEMFIIPKQVQDIKDFRNFKYSHRVDKKPNRQLINDTLYSTRKKDNSTYIVQTIKDIYAKDNTTLKKQFDKSPEKFLMYQHDPRTFEKLEVIMKQYANEKNPLAKYHEETGEYLTKYSKKNNGPIVKSLKYIGNKLGSHLDVTHQFKSSTKKLVKLSIKNYRFDVYLTEKGYKFVTIAYLNVFKKDNYYYIPKDKYQELKEKKKIKDTDQFIASFYKNDLIKLNGDLYKIIGVNSDDRNIIELDYYDIKYKDYCEINNIKGEPRIKKTIGKKTESIEKFTTDVLGNLYLHSTEKAPQLIFKRGL

SEQ ID NO: 2380 - protein, 1056 aa, synthetic construct
NQKFILGLDIGITSVGYGLIDYETKNIIDAGVRLFPEANVENNEGRRSKRGSRRLKRRRIHRLERVKLLLTEYDLINKEQIPTSNNPYQIRVKGLSEILSKDELAIALLHLAKRRGIHNVDVAADKEETASDSLSTKDQINKNAKFLESRYVCELQKERLENEGHVRGVENRFLTKDIVREAKKIIDTQMQYYPEIDETFKEKYISLVETRREYFEGPGQGSPFGWNGDLKKWYEMLMGHCTYFPQELRSVKYAYSADLFNALNDLNNLIIQRDNSEKLEYHEKYHIIENVFKQKKKPTLKQIAKEIGVNPEDIKGYRITKSGTPEFTSFKLFHDLKKVVKDHAILDDIDLLNQIAEILTIYQDKDSIVAELGQLEYLMSEADKQSISELTGYTGTHSLSLKCMNMIIDELWHSSMNQMEVFTYLNMRPKKYELKGYQRIPTDMIDDAILSPVVKRTFIQSINVINKVIEKYGIPEDIIIELARENNSDDRKKFINNLQKKNEATRKRINEIIGQTGNQNAKRIVEKIRLHDQQEGKCLYSLESIPLEDLLNNPNHYEVDHIIPRSVSFDNSYHNKVLVKQSEASKKSNLTPYQYFNSGKSKLSYNQFKQHILNLSKSQDRISKKKKEYLLEERDINKFEVQKEFINRNLVDTRYATRELTNYLKAYFSANNMNVKVKTINGSFTDYLRKVWKFKKERNHGYKHHAEDALIIANADFLFKENKKLKAVNSVLEKPEIETKQLDIQVDSEDNYSEMFIIPKQVQDIKDFRNFKYSHRVDKKPNRQLINDTLYSTRKKDNSTYIVQTIKDIYAKDNTTLKKQFDKSPEKFLMYQHDPRTFEKLEVIMKQYANEKNPLAKYHEETGEYLTKYSKKNNGPIVKSLKYIGNKLGSHLDVTHQFKSSTKKLVKLSIKNYRFDVYLTEKGYKFVTIAYLNVFKKDNYYYIPKDKYQELKEKKKIKDTDQFIASFYKNDLIKLNGDLYKIIGVNSDDRNIIELDYYDIKYKDYCEINNIKGEPRIKKTIGKKTESIEKFTTDVLGNLYLHSTEKAPQLIFKRGL

SEQ ID NO: 2381 - protein, 1057 aa, synthetic construct
MNQKFILGLDIGITSVGYGLIDYETKNIIDAGVRLFPEANVENNEGRRSKRGSRRLKRRRIHRLERVKLLLTEYDLINKEQIPTSNNPYQIRVKGLSEILSKDELAIALLHLAKRRGIHNVDVAADKEETASDSLSTKDQINKNAKFLESRYVCELQKERLENEGHVRGVENRFLTKDIVREAKKIIDTQMQYYPEIDETFKEKYISLVETRREYFEGPGQGSPFGWNGDLKKWYEMLMGHCTYFPQELRSVKYAYSADLFNALNDLNNLIIQRDNSEKLEYHEKYHIIENVFKQKKKPTLKQIAKEIGVNPEDIKGYRITKSGTPEFTSFKLFHDLKKVVKDHAILDDIDLLNQIAEILTIYQDKDSIVAELGQLEYLMSEADKQSISELTGYTGTHSLSLKCMNMIIDELWHSSMNQMEVFTYLNMRPKKYELKGYQRIPTDMIDDAILSPVVKRTFIQSINVINKVIEKYGIPEDIIIELARENNSDDRKKFINNLQKKNEATRKRINEIIGQTGNQNAKRIVEKIRLHDQQEGKCLYSLESIPLEDLLNNPNHYEVDHIIPRSVSFDNSYHNKVLVKQSENSKKSNLTPYQYFNSGKSKLSYNQFKQHILNLSKSQDRISKKKKEYLLEERDINKFEVQKEFINRNLVDTRYATRELTSYLKAYFSANNMDVKVKTINGSFTNHLRKVWRFDKYRNHGYKHHAEDALIIANADFLFKENKKLQNTNKILEKPTIENNTKKVTVEKEEDYNNVFETPKLVEDIKQYRDYKFSHRVDKKPNRQLINDTLYSTRMKDEHDYIVQTITDIYGKDNTNLKKQFNKNPEKFLMYQNDPKTFEKLSIIMKQYSDEKNPLAKYYEETGEYLTKYSKKNNGPIVKKIKLLGNKVGNHLDVTNKYENSTKKLVKLSIKNYRFDVYLTEKGYKFVTIAYLNVFKKDNYYYIPKDKYQELKEKKKIKDTDQFIASFYKNDLIKLNGDLYKIIGVNSDDRNIIELDYYDIKYKDYCEINNIKGEPRIKKTIGKKTESIEKFTTDVLGNLYLHSTEKAPQLIFKRGL

SEQ ID NO: 2382 - protein, 1057 aa, synthetic construct
MNQKFILGLDIGITSVGYGLIDYETKNIIDAGVRLFPEANVENNEGRRSKRGSRRLKRRRIHRLERVKLLLTEYDLINKEQIPTSNNPYQIRVKGLSEILSKDELAIALLHLAKRRGIHNVDVAADKEETASDSLSTKDQINKNAKFLESRYVCELQKERLENEGHVRGVENRFLTKDIVREAKKIIDTQMQYYPEIDETFKEKYISLVETRREYFEGPGQGSPFGWNGDLKKWYEMLMGHCTYFPQELRSVKYAYSADLFNALNDLNNLIIQRDNSEKLEYHEKYHIIENVFKQKKKPTLKQIAKEIGVNPEDIKGYRITKSGTPEFTSFKLFHDLKKVVKDHAILDDIDLLNQIAEILTIYQDKDSIVAELGQLEYLMSEADKQSISELTGYTGTHSLSLKCMNMIIDELWHSSMNQMEVFTYLNMRPKKYELKGYQRIPTDMIDDAILSPVVKRTFIQSINVINKVIEKYGIPEDIIIELARENNSDDRKKFINNLQKKNEATRKRINEIIGQTGNQNAKRIVEKIRLHDQQEGKCLYSLESIPLEDLLNNPNHYEVDHIIPRSVSFDNSYHNKVLVKQSEASKKSNLTPYQYFNSGKSKLSYNQFKQHILNLSKSQDRISKKKKEYLLEERDINKFEVQKEFINRNLVDTRYATRELTSYLKAYFSANNMDVKVKTINGSFTNHLRKVWRFDKYRNHGYKHHAEDALIIANADFLFKENKKLQNTNKILEKPTIENNTKKVTVEKEEDYNNVFETPKLVEDIKQYRDYKFSHRVDKKPNRQLINDTLYSTRMKDEHDYIVQTITDIYGKDNTNLKKQFNKNPEKFLMYQNDPKTFEKLSIIMKQYSDEKNPLAKYYEETGEYLTKYSKKNNGPIVKKIKLLGNKVGNHLDVTNKYENSTKKLVKLSIKNYRFDVYLTEKGYKFVTIAYLNVFKKDNYYYIPKDKYQELKEKKKIKDTDQFIASFYKNDLIKLNGDLYKIIGVNSDDRNIIELDYYDIKYKDYCEINNIKGEPRIKKTIGKKTESIEKFTTDVLGNLYLHSTEKAPQLIFKRGL

SEQ ID NO: 2383 - protein, 1056 aa, synthetic construct
NQKFILGLDIGITSVGYGLIDYETKNIIDAGVRLFPEANVENNEGRRSKRGSRRLKRRRIHRLERVKLLLTEYDLINKEQIPTSNNPYQIRVKGLSEILSKDELAIALLHLAKRRGIHNVDVAADKEETASDSLSTKDQINKNAKFLESRYVCELQKERLENEGHVRGVENRFLTKDIVREAKKIIDTQMQYYPEIDETFKEKYISLVETRREYFEGPGQGSPFGWNGDLKKWYEMLMGHCTYFPQELRSVKYAYSADLFNALNDLNNLIIQRDNSEKLEYHEKYHIIENVFKQKKKPTLKQIAKEIGVNPEDIKGYRITKSGTPEFTSFKLFHDLKKVVKDHAILDDIDLLNQIAEILTIYQDKDSIVAELGQLEYLMSEADKQSISELTGYTGTHSLSLKCMNMIIDELWHSSMNQMEVFTYLNMRPKKYELKGYQRIPTDMIDDAILSPVVKRTFIQSINVINKVIEKYGIPEDIIIELARENNSDDRKKFINNLQKKNEATRKRINEIIGQTGNQNAKRIVEKIRLHDQQEGKCLYSLESIPLEDLLNNPNHYEVDHIIPRSVSFDNSYHNKVLVKQSEASKKSNLTPYQYFNSGKSKLSYNQFKQHILNLSKSQDRISKKKKEYLLEERDINKFEVQKEFINRNLVDTRYATRELTSYLKAYFSANNMDVKVKTINGSFTNHLRKVWRFDKYRNHGYKHHAEDALIIANADFLFKENKKLQNTNKILEKPTIENNTKKVTVEKEEDYNNVFETPKLVEDIKQYRDYKFSHRVDKKPNRQLINDTLYSTRMKDEHDYIVQTITDIYGKDNTNLKKQFNKNPEKFLMYQNDPKTFEKLSIIMKQYSDEKNPLAKYYEETGEYLTKYSKKNNGPIVKKIKLLGNKVGNHLDVTNKYENSTKKLVKLSIKNYRFDVYLTEKGYKFVTIAYLNVFKKDNYYYIPKDKYQELKEKKKIKDTDQFIASFYKNDLIKLNGDLYKIIGVNSDDRNIIELDYYDIKYKDYCEINNIKGEPRIKKTIGKKTESIEKFTTDVLGNLYLHSTEKAPQLIFKRGL

SEQ ID NO: 2384 - protein, 1368 aa, synthetic construct
MDKKYSIGLDIGTNSVGWAVITDEYKVPSKKFKVLGNTDRHSIKKNLIGALLFDSGETAEATRLKRTARRRYTRRKNRICYLQEIFSNEMAKVDDSFFHRLEESFLVEEDKKHERHPIFGNIVDEVAYHEKYPTIYHLRKKLVDSTDKADLRLIYLALAHMIKFRGHFLIEGDLNPDNSDVDKLFIQLVQTYNQLFEENPINASGVDAKAILSARLSKSRRLENLIAQLPGEKKNGLFGNLIALSLGLTPNFKSNFDLAEDAKLQLSKDTYDDDLDNLLAQIGDQYADLFLAAKNLSDAILLSDILRVNTEITKAPLSASMIKRYDEHHQDLTLLKALVRQQLPEKYKEIFFDQSKNGYAGYIDGGASQEEFYKFIKPILEKMDGTEELLVKLNREDLLRKQRTFDNGSIPHQIHLGELHAILRRQEDFYPFLKDNREKIEKILTFRIPYYVGPLARGNSRFAWMTRKSEETITPWNFEEVVDKGASAQSFIERMTNFDKNLPNEKVLPKHSLLYEYFTVYNELTKVKYVTEGMRKPAFLSGEQKKAIVDLLFKTNRKVTVKQLKEDYFKKIECFDSVEISGVEDRFNASLGTYHDLLKIIKDKDFLDNEENEDILEDIVLTLTLFEDREMIEERLKTYAHLFDDKVMKQLKRRRYTGWGRLSRKLINGIRDKQSGKTILDFLKSDGFANRNFMQLIHDDSLTFKEDIQKAQVSGQGDSLHEHIANLAGSPAIKKGILQTVKVVDELVKVMGRHKPENIVIEMARENQTTQKGQKNSRERMKRIEEGIKELGSQILKEHPVENTQLQNEKLYLYYLQNGRDMYVDQELDINRLSDYDVDHIVPQSFLKDDSIDNKVLTRSDKNRGKSDNVPSEEVVKKMKNYWRQLLNAKLITQRKFDNLTKAERGGLSELDKAGFIKRQLVETRQITKHVAQILDSRMNTKYDENDKLIREVKVITLKSKLVSDFRKDFQFYKVREINNYHHAHDAYLNAVVGTALIKKYPKLESEFVYGDYKVYDVRKMIAKSEQEIGKATAKYFFYSNIMNFFKTEITLANGEIRKRPLIETNGETGEIVWDKGRDFATVRKVLSMPQVNIVKKTEVQTGGFSKESILPKRNSDKLIARKKDWDPKKYGGFLWPTVAYSVLVVAKVEKGKSKKLKSVKELLGITIMERSSFEKNPIDFLEAKGYKEVKKDLIIKLPKYSLFELENGRKRMLASAKQLQKGNELALPSKYVNFLYLASHYEKLKGSPEDNEQKQLFVEQHKHYLDEIIEQISEFSKRVILADANLDKVLSAYNKHRDKPIREQAENIIHLFTLTNLGAPAAFKYFDTTIDRKQYRSTKEVLDATLIHQSITGLYETRIDLSQLGGD

SEQ ID NO: 2385 - protein, 1368 aa, synthetic construct
MDKKYSIGLDIGTNSVGWAVITDEYKVPSKKFKVLGNTDRHSIKKNLIGALLFDSGETAEATRLKRTARRRYTRRKNRICYLQEIFSNEMAKVDDSFFHRLEESFLVEEDKKHERHPIFGNIVDEVAYHEKYPTIYHLRKKLVDSTDKADLRLIYLALAHMIKFRGHFLIEGDLNPDNSDVDKLFIQLVQTYNQLFEENPINASGVDAKAILSARLSKSRRLENLIAQLPGEKKNGLFGNLIALSLGLTPNFKSNFDLAEDAKLQLSKDTYDDDLDNLLAQIGDQYADLFLAAKNLSDAILLSDILRVNTEITKAPLSASMIKRYDEHHQDLTLLKALVRQQLPEKYKEIFFDQSKNGYAGYIDGGASQEEFYKFIKPILEKMDGTEELLVKLNREDLLRKQRTFDNGSIPHQIHLGELHAILRRQEDFYPFLKDNREKIEKILTFRIPYYVGPLARGNSRFAWMTRKSEETITPWNFEEVVDKGASAQSFIERMTNFDKNLPNEKVLPKHSLLYEYFTVYNELTKVKYVTEGMRKPAFLSGEQKKAIVDLLFKTNRKVTVKQLKEDYFKKIECFDSVEISGVEDRFNASLGTYHDLLKIIKDKDFLDNEENEDILEDIVLTLTLFEDREMIEERLKTYAHLFDDKVMKQLKRRRYTGWGRLSRKLINGIRDKQSGKTILDFLKSDGFANRNFMQLIHDDSLTFKEDIQKAQVSGQGDSLHEHIANLAGSPAIKKGILQTVKVVDELVKVMGRHKPENIVIEMARENQTTQKGQKNSRERMKRIEEGIKELGSQILKEHPVENTQLQNEKLYLYYLQNGRDMYVDQELDINRLSDYDVDAIVPQSFLKDDSIDNKVLTRSDKNRGKSDNVPSEEVVKKMKNYWRQLLNAKLITQRKFDNLTKAERGGLSELDKAGFIKRQLVETRQITKHVAQILDSRMNTKYDENDKLIREVKVITLKSKLVSDFRKDFQFYKVREINNYHHAHDAYLNAVVGTALIKKYPKLESEFVYGDYKVYDVRKMIAKSEQEIGKATAKYFFYSNIMNFFKTEITLANGEIRKRPLIETNGETGEIVWDKGRDFATVRKVLSMPQVNIVKKTEVQTGGFSKESILPKRNSDKLIARKKDWDPKKYGGFLWPTVAYSVLVVAKVEKGKSKKLKSVKELLGITIMERSSFEKNPIDFLEAKGYKEVKKDLIIKLPKYSLFELENGRKRMLASAKQLQKGNELALPSKYVNFLYLASHYEKLKGSPEDNEQKQLFVEQHKHYLDEIIEQISEFSKRVILADANLDKVLSAYNKHRDKPIREQAENIIHLFTLTNLGAPAAFKYFDTTIDRKQYRSTKEVLDATLIHQSITGLYETRIDLSQLGGD

SEQ ID NO: 2386 - protein, 1367 aa, synthetic construct
DKKYSIGLDIGTNSVGWAVITDEYKVPSKKFKVLGNTDRHSIKKNLIGALLFDSGETAEATRLKRTARRRYTRRKNRICYLQEIFSNEMAKVDDSFFHRLEESFLVEEDKKHERHPIFGNIVDEVAYHEKYPTIYHLRKKLVDSTDKADLRLIYLALAHMIKFRGHFLIEGDLNPDNSDVDKLFIQLVQTYNQLFEENPINASGVDAKAILSARLSKSRRLENLIAQLPGEKKNGLFGNLIALSLGLTPNFKSNFDLAEDAKLQLSKDTYDDDLDNLLAQIGDQYADLFLAAKNLSDAILLSDILRVNTEITKAPLSASMIKRYDEHHQDLTLLKALVRQQLPEKYKEIFFDQSKNGYAGYIDGGASQEEFYKFIKPILEKMDGTEELLVKLNREDLLRKQRTFDNGSIPHQIHLGELHAILRRQEDFYPFLKDNREKIEKILTFRIPYYVGPLARGNSRFAWMTRKSEETITPWNFEEVVDKGASAQSFIERMTNFDKNLPNEKVLPKHSLLYEYFTVYNELTKVKYVTEGMRKPAFLSGEQKKAIVDLLFKTNRKVTVKQLKEDYFKKIECFDSVEISGVEDRFNASLGTYHDLLKIIKDKDFLDNEENEDILEDIVLTLTLFEDREMIEERLKTYAHLFDDKVMKQLKRRRYTGWGRLSRKLINGIRDKQSGKTILDFLKSDGFANRNFMQLIHDDSLTFKEDIQKAQVSGQGDSLHEHIANLAGSPAIKKGILQTVKVVDELVKVMGRHKPENIVIEMARENQTTQKGQKNSRERMKRIEEGIKELGSQILKEHPVENTQLQNEKLYLYYLQNGRDMYVDQELDINRLSDYDVDAIVPQSFLKDDSIDNKVLTRSDKNRGKSDNVPSEEVVKKMKNYWRQLLNAKLITQRKFDNLTKAERGGLSELDKAGFIKRQLVETRQITKHVAQILDSRMNTKYDENDKLIREVKVITLKSKLVSDFRKDFQFYKVREINNYHHAHDAYLNAVVGTALIKKYPKLESEFVYGDYKVYDVRKMIAKSEQEIGKATAKYFFYSNIMNFFKTEITLANGEIRKRPLIETNGETGEIVWDKGRDFATVRKVLSMPQVNIVKKTEVQTGGFSKESILPKRNSDKLIARKKDWDPKKYGGFLWPTVAYSVLVVAKVEKGKSKKLKSVKELLGITIMERSSFEKNPIDFLEAKGYKEVKKDLIIKLPKYSLFELENGRKRMLASAKQLQKGNELALPSKYVNFLYLASHYEKLKGSPEDNEQKQLFVEQHKHYLDEIIEQISEFSKRVILADANLDKVLSAYNKHRDKPIREQAENIIHLFTLTNLGAPAAFKYFDTTIDRKQYRSTKEVLDATLIHQSITGLYETRIDLSQLGGD

SEQ ID NO: 2387 - protein, 7 aa, synthetic construct
PKKKRKV

SEQ ID NO: 2388 - protein, 19 aa, synthetic construct
MKRTADGSEFESPKKKRKV

SEQ ID NO: 2389 - protein, 30 aa, synthetic construct
MDSLLMNRRKFLYQFKNVRWAKGRRETYLC

SEQ ID NO: 2390 - protein, 20 aa, synthetic construct
AVKRPAATKKAGQAKKKKLD

SEQ ID NO: 2391 - protein, 25 aa, synthetic construct
MSRRRKANPTKLSENAKKLAKEVEN

SEQ ID NO: 2392 - protein, 9 aa, synthetic construct
PAAKRVKLD

SEQ ID NO: 2393 - protein, 9 aa, synthetic construct
KLKIKRPVK

SEQ ID NO: 2394 - protein, 8 aa, synthetic construct
VSRKRPRP

SEQ ID NO: 2395 - protein, 10 aa, synthetic construct
EGAPPAKRAR

SEQ ID NO: 2396 - protein, 16 aa, synthetic construct
RQARRNRRRRWRERNR

SEQ ID NO: 2397 - protein, 12 aa, synthetic construct
PPQPKKKPLDGE

SEQ ID NO: 2398 - protein, 17 aa, synthetic construct
KRTADGSEFEPKKKRKV

SEQ ID NO: 2399 - protein, 18 aa, synthetic construct
KRTADGSEFESPKKKRKV

SEQ ID NO: 2400 - protein, 19 aa, synthetic construct
NLSKRPAAIKKAGQAKKKK

SEQ ID NO: 2401 - protein, 11 aa, synthetic construct
RQRRNELKRSF

SEQ ID NO: 2402 - protein, 38 aa, synthetic construct
NQSSNFGPMKGGNFGGRSSGPYGGGGQYFAKPRNQGGY

SEQ ID NO: 2403 - protein, 16 aa, synthetic construct
KRPAATKKAGQAKKKK

SEQ ID NO: 2404 - protein, 16 aa, synthetic construct
  VARIANT 3..12: note = Any amino acid
KRXXXXXXXXXXKKKL

SEQ ID NO: 2405 - protein, 2117 aa, synthetic construct
MKRTADGSEFESPKKKRKVDKKYSIGLDIGTNSVGWAVITDEYKVPSKKFKVLGNTDRHSIKKNLIGALLFDSGETAEATRLKRTARRRYTRRKNRICYLQEIFSNEMAKVDDSFFHRLEESFLVEEDKKHERHPIFGNIVDEVAYHEKYPTIYHLRKKLVDSTDKADLRLIYLALAHMIKFRGHFLIEGDLNPDNSDVDKLFIQLVQTYNQLFEENPINASGVDAKAILSARLSKSRRLENLIAQLPGEKKNGLFGNLIALSLGLTPNFKSNFDLAEDAKLQLSKDTYDDDLDNLLAQIGDQYADLFLAAKNLSDAILLSDILRVNTEITKAPLSASMIKRYDEHHQDLTLLKALVRQQLPEKYKEIFFDQSKNGYAGYIDGGASQEEFYKFIKPILEKMDGTEELLVKLNREDLLRKQRTFDNGSIPHQIHLGELHAILRRQEDFYPFLKDNREKIEKILTFRIPYYVGPLARGNSRFAWMTRKSEETITPWNFEEVVDKGASAQSFIERMTNFDKNLPNEKVLPKHSLLYEYFTVYNELTKVKYVTEGMRKPAFLSGEQKKAIVDLLFKTNRKVTVKQLKEDYFKKIECFDSVEISGVEDRFNASLGTYHDLLKIIKDKDFLDNEENEDILEDIVLTLTLFEDREMIEERLKTYAHLFDDKVMKQLKRRRYTGWGRLSRKLINGIRDKQSGKTILDFLKSDGFANRNFMQLIHDDSLTFKEDIQKAQVSGQGDSLHEHIANLAGSPAIKKGILQTVKVVDELVKVMGRHKPENIVIEMARENQTTQKGQKNSRERMKRIEEGIKELGSQILKEHPVENTQLQNEKLYLYYLQNGRDMYVDQELDINRLSDYDVDAIVPQSFLKDDSIDNKVLTRSDKNRGKSDNVPSEEVVKKMKNYWRQLLNAKLITQRKFDNLTKAERGGLSELDKAGFIKRQLVETRQITKHVAQILDSRMNTKYDENDKLIREVKVITLKSKLVSDFRKDFQFYKVREINNYHHAHDAYLNAVVGTALIKKYPKLESEFVYGDYKVYDVRKMIAKSEQEIGKATAKYFFYSNIMNFFKTEITLANGEIRKRPLIETNGETGEIVWDKGRDFATVRKVLSMPQVNIVKKTEVQTGGFSKESILPKRNSDKLIARKKDWDPKKYGGFDSPTVAYSVLVVAKVEKGKSKKLKSVKELLGITIMERSSFEKNPIDFLEAKGYKEVKKDLIIKLPKYSLFELENGRKRMLASAGELQKGNELALPSKYVNFLYLASHYEKLKGSPEDNEQKQLFVEQHKHYLDEIIEQISEFSKRVILADANLDKVLSAYNKHRDKPIREQAENIIHLFTLTNLGAPAAFKYFDTTIDRKRYTSTKEVLDATLIHQSITGLYETRIDLSQLGGDSGGSSGGSSGSETPGTSESATPESSGGSSGGSSTLNIEDEYRLHETSKEPDVSLGSTWLSDFPQAWAETGGMGLAVRQAPLIIPLKATSTPVSIKQYPMSQEARLGIKPHIQRLLDQGILVPCQSPWNTPLLPVKKPGTNDYRPVQDLREVNKRVEDIHPTVPNPYNLLSGLPPSHQWYTVLDLKDAFFCLRLHPTSQPLFAFEWRDPEMGISGQLTWTRLPQGFKNSPTLFNEALHRDLADFRIQHPDLILLQYVDDLLLAATSELDCQQGTRALLQTLGNLGYRASAKKAQICQKQVKYLGYLLKEGQRWLTEARKETVMGQPTPKTPRQLREFLGKAGFCRLFIPGFAEMAAPLYPLTKPGTLFNWGPDQQKAYQEIKQALLTAPALGLPDLTKPFELFVDEKQGYAKGVLTQKLGPWRRPVAYLSKKLDPVAAGWPPCLRMVAAIAVLTKDAGKLTMGQPLVILAPHAVEALVKQPPDRWLSNARMTHYQALLLDTDRVQFGPVVALNPATLLPLPEEGLQHNCLDILAEAHGTRPDLTDQPLPDADHTWYTDGSSLLQEGQRKAGAAVTTETEVIWAKALPAGTSAQRAELIALTQALKMAEGKKLNVYTDSRYAFATAHIHGEIYRRRGWLTSEGKEIKNKDEILALLKALFLPKRLSIIHCPGHQKGHSAEARGNRMADQAARKAAITETPDTSTLLIENSSPSGGSKRTADGSEFEPKKKRKV

SEQ ID NO: 2406 - protein, 2131 aa, synthetic construct
MKRTADGSEFESPKKKRKVDKKYSIGLDIGTNSVGWAVITDEYKVPSKKFKVLGNTDRHSIKKNLIGALLFDSGETAEATRLKRTARRRYTRRKNRICYLQEIFSNEMAKVDDSFFHRLEESFLVEEDKKHERHPIFGNIVDEVAYHEKYPTIYHLRKKLVDSTDKADLRLIYLALAHMIKFRGHFLIEGDLNPDNSDVDKLFIQLVQTYNQLFEENPINASGVDAKAILSARLSKSRKLENLIAQLPGEKKNGLFGNLIALSLGLTPNFKSNFDLAEDAKLQLSKDTYDDDLDNLLAQIGDQYADLFLAAKNLSDAILLSDILRVNTEITKAPLSASMIKRYDEHHQDLTLLKALVRQQLPEKYKEIFFDQSKNGYAGYIDGGASQEEFYKFIKPILEKMDGTEELLVKLKREDLLRKQRTFDNGSIPHQIHLGELHAILRRQEDFYPFLKDNREKIEKILTFRIPYYVGPLARGNSRFAWMTRKSEETITPWNFEEVVDKGASAQSFIERMTNFDKNLPNEKVLPKHSLLYEYFTVYNELTKVKYVTEGMRKPAFLSGEQKKAIVDLLFKTNRKVTVKQLKEDYFKKIECFDSVEISGVEDRFNASLGTYHDLLKIIKDKDFLDNEENEDILEDIVLTLTLFEDREMIEERLKTYAHLFDDKVMKQLKRRRYTGWGRLSRKLINGIRDKQSGKTILDFLKSDGFANRNFMQLIHDDSLTFKEDIQKAQVSGQGDSLHEHIANLAGSPAIKKGILQTVKVVDELVKVMGRHKPENIVIEMARENQTTQKGQKNSRERMKRIEEGIKELGSQILKEHPVENTQLQNEKLYLYYLQNGRDMYVDQELDINRLSDYDVDAIVPQSFLKDDSIDNKVLTRSDKNRGKSDNVPSEEVVKKMKNYWRQLLNAKLITQRKFDNLTKAERGGLSELDKAGFIKRQLVETRQITKHVAQILDSRMNTKYDENDKLIREVKVITLKSKLVSDFRKDFQFYKVREINNYHHAHDAYLNAVVGTALIKKYPKLESEFVYGDYKVYDVRKMIAKSEQEIGKATAKYFFYSNIMNFFKTEITLANGEIRKRPLIETNGETGEIVWDKGRDFATVRKVLSMPQVNIVKKTEVQTGGFSKESILPKRNSDKLIARKKDWDPKKYGGFDSPTVAYSVLVVAKVEKGKSKKLKSVKELLGITIMERSSFEKNPIDFLEAKGYKEVKKDLIIKLPKYSLFELENGRKRMLASAGELQKGNELALPSKYVNFLYLASHYEKLKGSPEDNEQKQLFVEQHKHYLDEIIEQISEFSKRVILADANLDKVLSAYNKHRDKPIREQAENIIHLFTLTNLGAPAAFKYFDTTIDRKRYTSTKEVLDATLIHQSITGLYETRIDLSQLGGDSGGSSGGSKRTADGSEFESPKKKRKVSGGSSGGSTLNIEDEYRLHETSKEPDVSLGSTWLSDFPQAWAETGGMGLAVRQAPLIIPLKATSTPVSIKQYPMSQEARLGIKPHIQRLLDQGILVPCQSPWNTPLLPVKKPGTNDYRPVQDLREVNKRVEDIHPTVPNPYNLLSGLPPSHQWYTVLDLKDAFFCLRLHPTSQPLFAFEWRDPEMGISGQLTWTRLPQGFKNSPTLFNEALHRDLADFRIQHPDLILLQYVDDLLLAATSELDCQQGTRALLQTLGNLGYRASAKKAQICQKQVKYLGYLLKEGQRWLTEARKETVMGQPTPKTPRQLREFLGKAGFCRLFIPGFAEMAAPLYPLTKPGTLFNWGPDQQKAYQEIKQALLTAPALGLPDLTKPFELFVDEKQGYAKGVLTQKLGPWRRPVAYLSKKLDPVAAGWPPCLRMVAAIAVLTKDAGKLTMGQPLVILAPHAVEALVKQPPDRWLSNARMTHYQALLLDTDRVQFGPVVALNPATLLPLPEEGLQHNCLDILAEAHGTRPDLTDQPLPDADHTWYTDGSSLLQEGQRKAGAAVTTETEVIWAKALPAGTSAQRAELIALTQALKMAEGKKLNVYTDSRYAFATAHIHGEIYRRRGWLTSEGKEIKNKDEILALLKALFLPKRLSIIHCPGHQKGHSAEARGNRMADQAARKAAITETPDTSTLLIENSSPSGGSKRTADGSEFESPKKKRKVGSGPAAKRVKLD

SEQ ID NO: 2407 - protein, 21 aa, synthetic construct
SGGSKRTADGSEFEPKKKRKV

SEQ ID NO: 2408 - protein, 34 aa, synthetic construct
SGGSSGGSKRTADGSEFESPKKKRKVSGGSSGGS

SEQ ID NO: 2409 - protein, 22 aa, synthetic construct
SGGSKRTADGSEFESPKKKRKV

SEQ ID NO: 2410 - protein, 12 aa, synthetic construct
GSGPAAKRVKLD

SEQ ID NO: 2411 - RNA, 33 nt, synthetic construct
  source 1..33: mol_type = other RNA
gccaacatgaggatcacccatgtctgcagggcc

SEQ ID NO: 2412 - protein, 131 aa, synthetic construct
GSASNFTQFVLVDNGGTGDVTVAPSNFANGVAEWISSNSRSQAYKVTCSVRQSSAQNRKYTIKVEVPKVATQTVGGEELPVAGWRSYLNMELTIPIFATNSDCELIVKAMQGLLKDGNPIPSAIAANSGIY

SEQ ID NO: 2413 - protein, 150 aa, synthetic construct
  VARIANT 6..150: note = GGGGS repeats may be deleted
GGGGSGGGGSGGGGSGGGGSGGGGSGGGGSGGGGSGGGGSGGGGSGGGGSGGGGSGGGGSGGGGSGGGGSGGGGSGGGGSGGGGSGGGGSGGGGSGGGGSGGGGSGGGGSGGGGSGGGGSGGGGSGGGGSGGGGSGGGGSGGGGSGGGGS

SEQ ID NO: 2414 - protein, 30 aa, synthetic construct
  VARIANT 2..30: note = Residues may be deleted
GGGGGGGGGGGGGGGGGGGGGGGGGGGGGG

SEQ ID NO: 2415 - protein, 150 aa, synthetic construct
  VARIANT 6..150: note = EAAAK repeats may be deleted
EAAAKEAAAKEAAAKEAAAKEAAAKEAAAKEAAAKEAAAKEAAAKEAAAKEAAAKEAAAKEAAAKEAAAKEAAAKEAAAKEAAAKEAAAKEAAAKEAAAKEAAAKEAAAKEAAAKEAAAKEAAAKEAAAKEAAAKEAAAKEAAAKEAAAK

SEQ ID NO: 2416 - protein, 90 aa, synthetic construct
  VARIANT 4..90: note = GGS repeats may be deleted
GGSGGSGGSGGSGGSGGSGGSGGSGGSGGSGGSGGSGGSGGSGGSGGSGGSGGSGGSGGSGGSGGSGGSGGSGGSGGSGGSGGSGGSGGS

SEQ ID NO: 2417 - protein, 120 aa, synthetic construct
  VARIANT 5..120: note = SGGS repeats may be deleted
SGGSSGGSSGGSSGGSSGGSSGGSSGGSSGGSSGGSSGGSSGGSSGGSSGGSSGGSSGGSSGGSSGGSSGGSSGGSSGGSSGGSSGGSSGGSSGGSSGGSSGGSSGGSSGGSSGGSSGGS

SEQ ID NO: 2418 - protein, 60 aa, synthetic construct
  VARIANT 3..60: note = XP repeats may be deleted and wherein X is any amino acid
XPXPXPXPXPXPXPXPXPXPXPXPXPXPXPXPXPXPXPXPXPXPXPXPXPXPXPXPXPXP

SEQ ID NO: 2419 - protein, 21 aa, synthetic construct
  VARIANT 4..21: note = 4 or 6 GGS repeats may be deleted
GGSGGSGGSGGSGGSGGSGGS

SEQ ID NO: 2420 - protein, 16 aa, synthetic construct
SGSETPGTSESATPES

SEQ ID NO: 2421 - protein, 32 aa, synthetic construct
SGGSSGGSSGSETPGTSESATPESSGGSSGGS

SEQ ID NO: 2422 - protein, 10 aa, synthetic construct
SGGSGGSGGS

SEQ ID NO: 2423 - protein, 4 aa, synthetic construct
SGGS

SEQ ID NO: 2424 - protein, 60 aa, synthetic construct
SGGSSGGSSGSETPGTSESATPESAGSYPYDVPDYAGSAAPAAKKKKLDGSGSGGSSGGS

SEQ ID NO: 2425 - protein, 6 aa, synthetic construct
GGSGGS

SEQ ID NO: 2426 - protein, 9 aa, synthetic construct
GGSGGSGGS

SEQ ID NO: 2427 - protein, 33 aa, synthetic construct
SGGSSGGSSGSETPGTSESATPESSGGSSGGSS

SEQ ID NO: 2428 - RNA, 76 nt, synthetic construct
  source 1..76: mol_type = other RNA
gttttagagctagaaatagcaagttaaaataaggctagtccgttatcaacttgaaaaagtggcaccgagtcggtgc

SEQ ID NO: 2429 - RNA, 76 nt, synthetic construct
  source 1..76: mol_type = other RNA
gtttaagagctagaaatagcaagtttaaataaggctagtccgttatcaacttgaaaaagtggcaccgagtcggtgc

SEQ ID NO: 2430 - RNA, 76 nt, synthetic construct
  source 1..76: mol_type = other RNA
gtttaagagctagaaatagcaagtttaaataaggctagtccgttatcagcgtgaaaacgcggcaccgagtcggtgc

SEQ ID NO: 2431 - RNA, 78 nt, synthetic construct
  source 1..78: mol_type = other RNA
gtttaagagcggggaaatccgcaagtttaaataaggctagtccgttatcagcgtgaaaacgcggcaccgagtcggtgc

SEQ ID NO: 2432 - RNA, 86 nt, synthetic construct
  source 1..86: mol_type = other RNA
gtttaagagctatgctggaaacagcatagcaagtttaaataaggctagtccgttatcaacttgaaaaagtggcaccgagtcggtgc

SEQ ID NO: 2433 - RNA, 86 nt, synthetic construct
  source 1..86: mol_type = other RNA
gtttaagagctatgctggaaacagcatagcaagtttaaataaggctagtccgttatcagcgtgaaaacgcggcaccgagtcggtgc

SEQ ID NO: 2434 - RNA, 76 nt, synthetic construct
  source 1..76: mol_type = other RNA
gttttagagctatacgtagcaagttaaaataaggctagtccgttatcaactttacgaagtggcaccgagtcggtgc

SEQ ID NO: 2435 - RNA, 76 nt, synthetic construct
  source 1..76: mol_type = other RNA
gttttagagctatacgtagcaagttaaaataaggctagtccgttatcaactttacgaagtgggaccgagtcggtcc

SEQ ID NO: 2436 - RNA, 88 nt, synthetic construct
  source 1..88: mol_type = other RNA
gttttagagctagctcatgaaaatgagctagcaagttaaaataaggctagtccgttatcaacttgaaaaagtgggaccgagtcggtcc

SEQ ID NO: 2437 - RNA, 76 nt, synthetic construct
  source 1..76: mol_type = other RNA
gtttgagagctagaaatagcaagtttaaataaggctagtccgttatcaacttgaaaaagtgggaccgagtcggtcc

SEQ ID NO: 2438 - skipped

SEQ ID NO: 2439 - RNA, 86 nt, synthetic construct
  source 1..86: mol_type = other RNA
gttttagagctatgctggaaacagcatagcaagttaaaataaggctagtccgttatcaacttgaaaaagtggcaccgagtcggtgc

SEQ ID NO: 2440 - skipped

SEQ ID NO: 2441 - RNA, 76 nt, synthetic construct
  source 1..76: mol_type = other RNA
gttttagagctagaaatagcaagttaaaataaggctagtccgttatcgacttgaaaaagtcgcaccgagtcggtgc

SEQ ID NO: 2442 - RNA, 22 nt, synthetic construct
  source 1..22: mol_type = other RNA
cgcgtctctacgtgggggcgcg

SEQ ID NO: 2443 - RNA, 22 nt, synthetic construct
  source 1..22: mol_type = other RNA
cgggtctctacgtgggggcccg

SEQ ID NO: 2444 - RNA, 22 nt, synthetic construct
  source 1..22: mol_type = other RNA
gcggcaccgtccgcccaaacgg

SEQ ID NO: 2445 - RNA, 37 nt, synthetic construct
  source 1..37: mol_type = other RNA
cgcggttctatctagttacgcgttaaaccaactagaa

SEQ ID NO: 2446 - RNA, 56 nt, synthetic construct
  source 1..56: mol_type = other RNA
gtcagggtcaggagcccccccctgaacccaggataaccctcaaagtcggggggcaa

SEQ ID NO: 2447-2555 - skipped (109 entries)

SEQ ID NO: 2556 - RNA, 55 nt, synthetic construct
  source 1..55: mol_type = other RNA
gggtcaggagccccccccctgaacccaggataaccctcaaagtcggggggcaacc

SEQ ID NO: 2557 - RNA, 60 nt, synthetic construct
  source 1..60: mol_type = other RNA
gtcagggtcaggagccccccccctgaacccaggataaccctcaaagtcggggggcaaccc

SEQ ID NO: 2558 - RNA, 56 nt, synthetic construct
  source 1..56: mol_type = other RNA
gggtcaggagccccccccctgaacccaggaaaaccctcaaagtcggggggcaaccc

SEQ ID NO: 2559 - RNA, 56 nt, synthetic construct
  source 1..56: mol_type = other RNA
gggtcaggagccccccccctgcacccaggaaaaccctcaaagtcggggggcaaccc

SEQ ID NO: 2560 - RNA, 56 nt, synthetic construct
  source 1..56: mol_type = other RNA
gggtcaggagccccccccctgcacccaggataaccctcaaagtcggggggcaaccc

SEQ ID NO: 2561 - RNA, 60 nt, synthetic construct
  source 1..60: mol_type = other RNA
gtcagggtcaggagccccccccctgaacccaggaaaaccctcaaagtcggggggcaaccc

SEQ ID NO: 2562 - RNA, 60 nt, synthetic construct
  source 1..60: mol_type = other RNA
gtcagggtcaggagccccccccctgcacccaggaaaaccctcaaagtcggggggcaaccc

SEQ ID NO: 2563 - RNA, 51 nt, synthetic construct
  source 1..51: mol_type = other RNA
gggtcaggagccccccccctgaacccaggataaccctcaaagtcggggggc

SEQ ID NO: 2564 - RNA, 13 nt, synthetic construct
  source 1..13: mol_type = other RNA
tggtggtggtggt

SEQ ID NO: 2565 - RNA, 20 nt, synthetic construct
  source 1..20: mol_type = other RNA
gggacagggcagggacaggg

SEQ ID NO: 2566 - RNA, 21 nt, synthetic construct
  source 1..21: mol_type = other RNA
gggtccgggtctgggtctggg

SEQ ID NO: 2567 - RNA, 19 nt, synthetic construct
  source 1..19: mol_type = other RNA
gggcagggtctgggctggg

SEQ ID NO: 2568 - RNA, 19 nt, synthetic construct
  source 1..19: mol_type = other RNA
gggctgggatgggaaaggg

SEQ ID NO: 2569 - RNA, 19 nt, synthetic construct
  source 1..19: mol_type = other RNA
gggctctgggtgggccggg

SEQ ID NO: 2570 - RNA, 18 nt, synthetic construct
  source 1..18: mol_type = other RNA
gggctgggctgggcaggg

SEQ ID NO: 2571 - RNA, 17 nt, synthetic construct
  source 1..17: mol_type = other RNA
gggtgggctgggaaggg

SEQ ID NO: 2572 - RNA, 17 nt, synthetic construct
  source 1..17: mol_type = other RNA
gggagggagggctaggg

SEQ ID NO: 2573 - RNA, 17 nt, synthetic construct
  source 1..17: mol_type = other RNA
gggcagggctgggaggg

SEQ ID NO: 2574 - RNA, 16 nt, synthetic construct
  source 1..16: mol_type = other RNA
gggtgggagggctggg

SEQ ID NO: 2575 - RNA, 43 nt, synthetic construct
  source 1..43: mol_type = other RNA
gcgtaacctccatccgagttgcaagagagggaaacgcagtctc

SEQ ID NO: 2576 - RNA, 42 nt, synthetic construct
  source 1..42: mol_type = other RNA
ttgacgcggttctatctagttacgcgttaaaccaactagaaa

SEQ ID NO: 2577 - RNA, 42 nt, synthetic construct
  source 1..42: mol_type = other RNA
ttgacgcggttctatctacttacgcgttaaaccaactagaaa

SEQ ID NO: 2578 - RNA, 44 nt, synthetic construct
  source 1..44: mol_type = other RNA
cgcgagtctaggggataacgcgttaaacttcctagaaggcggtt

SEQ ID NO: 2579 - RNA, 44 nt, synthetic construct
  source 1..44: mol_type = other RNA
cgcggatctagattgtaacgcgttaaaccatctagaaggcggtt

SEQ ID NO: 2580 - RNA, 44 nt, synthetic construct
  source 1..44: mol_type = other RNA
cgcgtcgctaccgcccggcgcgttaaacacactagaaggcggtt

SEQ ID NO: 2581 - RNA, 37 nt, synthetic construct; identical to SEQ ID NO: 2445
  source 1..37: mol_type = other RNA

SEQ ID NO: 2582 - RNA, 68 nt, synthetic construct
  source 1..68: mol_type = other RNA
ggccggcatggtcccagcctcctcgctggcgccggctgggcaacatgcttcggcatggcgaatgggac

SEQ ID NO: 2583 - RNA, 75 nt, synthetic construct
  source 1..75: mol_type = other RNA
  misc_difference 72..75: note = Nucleotides may be deleted
ggccggcatggtcccagcctcctcgctggcgccggctgggcaacatgcttcggcatggcgaatgggacttttttt

SEQ ID NO: 2584 - RNA, 18 nt, synthetic construct
  source 1..18: mol_type = other RNA
ggtgggagacgtcccacc

SEQ ID NO: 2585 - RNA, 16 nt, synthetic construct
  source 1..16: mol_type = other RNA
tgggagacgtcccacc

SEQ ID NO: 2586 - RNA, 23 nt, synthetic construct
  source 1..23: mol_type = other RNA
  misc_difference 20..23: note = Nucleotides may be deleted
tgggagacgtcccaccttttttt

SEQ ID NO: 2587 - RNA, 24 nt, synthetic construct
  source 1..24: mol_type = other RNA
gagcagcatggcgtcgctgctcac

SEQ ID NO: 2588 - RNA, 20 nt, synthetic construct
  source 1..20: mol_type = other RNA
ccatcagttgacaccctgag

SEQ ID NO: 2589 - RNA, 28 nt, synthetic construct
  source 1..28: mol_type = other RNA
  misc_difference 25..28: note = Nucleotides may be deleted
ccatcagttgacaccctgaggttttttt

SEQ ID NO: 2590 - RNA, 28 nt, synthetic construct
  source 1..28: mol_type = other RNA
gcagacctaagtggtgacatatggtctg

SEQ ID NO: 2591 - RNA, 24 nt, synthetic construct
  source 1..24: mol_type = other RNA
catgcgattagaaataatcgcatg

SEQ ID NO: 2592 - RNA, 31 nt, synthetic construct
  source 1..31: mol_type = other RNA
  misc_difference 28..31: note = Nucleotides may be deleted
catgcgattagaaataatcgcatgttttttt

SEQ ID NO: 2593 - RNA, 118 nt, synthetic construct
  source 1..118: mol_type = other RNA
tctgccatcaaagctgcgaccgtgctcagtctggtgggagacgtcccaccggccggcatggtcccagcctcctcgctggcgccggctgggcaacatgcttcggcatggcgaatgggac

SEQ ID NO: 2594 - RNA, 21 nt, synthetic construct
  source 1..21: mol_type = other RNA
ccatcagttgacaccctgagg

SEQ ID NO: 2595 - protein, 16 aa, synthetic construct
RQIKIWFQNRRMKWKK

SEQ ID NO: 2596 - protein, 9 aa, synthetic construct
RRRRRRRRR

SEQ ID NO: 2597 - protein, 8 aa, synthetic construct
RRRRRRRR

SEQ ID NO: 2598 - protein, 1480 aa, Homo sapiens
MQRSPLEKASVVSKLFFSWTRPILRKGYRQRLELSDIYQIPSVDSADNLSEKLEREWDRELASKKNPKLINALRRCFFWRFMFYGIFLYLGEVTKAVQPLLLGRIIASYDPDNKEERSIAIYLGIGLCLLFIVRTLLLHPAIFGLHHIGMQMRIAMFSLIYKKTLKLSSRVLDKISIGQLVSLLSNNLNKFDEGLALAHFVWIAPLQVALLMGLIWELLQASAFCGLGFLIVLALFQAGLGRMMMKYRDQRAGKISERLVITSEMIENIQSVKAYCWEEAMEKMIENLRQTELKLTRKAAYVRYFNSSAFFFSGFFVVFLSVLPYALIKGIILRKIFTTISFCIVLRMAVTRQFPWAVQTWYDSLGAINKIQDFLQKQEYKTLEYNLTTTEVVMENVTAFWEEGFGELFEKAKQNNNNRKTSNGDDSLFFSNFSLLGTPVLKDINFKIERGQLLAVAGSTGAGKTSLLMVIMGELEPSEGKIKHSGRISFCSQFSWIMPGTIKENIIFGVSYDEYRYRSVIKACQLEEDISKFAEKDNIVLGEGGITLSGGQRARISLARAVYKDADLYLLDSPFGYLDVLTEKEIFESCVCKLMANKTRILVTSKMEHLKKADKILILHEGSSYFYGTFSELQNLQPDFSSKLMGCDSFDQFSAERRNSILTETLHRFSLEGDAPVSWTETKKQSFKQTGEFGEKRKNSILNPINSIRKFSIVQKTPLQMNGIEEDSDEPLERRLSLVPDSEQGEAILPRISVISTGPTLQARRRQSVLNLMTHSVNQGQNIHRKTTASTRKVSLAPQANLTELDIYSRRLSQETGLEISEEINEEDLKECFFDDMESIPAVTTWNTYLRYITVHKSLIFVLIWCLVIFLAEVAASLVVLWLLGNTPLQDKGNSTHSRNNSYAVIITSTSSYYVFYIYVGVADTLLAMGFFRGLPLVHTLITVSKILHHKMLHSVLQAPMSTLNTLKAGGILNRFSKDIAILDDLLPLTIFDFIQLLLIVIGAIAVVAVLQPYIFVATVPVIVAFIMLRAYFLQTSQQLKQLESEGRSPIFTHLVTSLKGLWTLRAFGRQPYFETLFHKALNLHTANWFLYLSTLRWFQMRIEMIFVIFFIAVTFISILTTGEGEGRVGIILTLAMNIMSTLQWAVNSSIDVDSLMRSVSRVFKFIDMPTEGKPTKSTKPYKNGQLSKVMIIENSHVKKDDIWPSGGQMTVKDLTAKYTEGGNAILENISFSISPGQRVGLLGRTGSGKSTLLSAFLRLLNTEGEIQIDGVSWDSITLQQWRKAFGVIPQKVFIFSGTFRKNLDPYEQWSDQEIWKVADEVGLRSVIEQFPGKLDFVLVDGGCVLSHGHKQLMCLARSVLSKAKILLLDEPSAHLDPVTYQIIRRTLKQAFADCTVILCEHRIEAMLECQQFLVIEENKVRQYDSIQKLLNERSLFRQAISPSDRVKLFPHRNSSKCKSKPQIAALKEETEEEVQDTRL

SEQ ID NO: 2599 - RNA, 26 nt, synthetic construct
  source 1..26: mol_type = other RNA
gctatattcatcataggaaacaccaa

SEQ ID NO: 2600 - skipped

SEQ ID NO: 2601 - RNA, 14 nt, synthetic construct
  source 1..14: mol_type = other RNA
aggaagaaagatga

SEQ ID NO: 2602 - skipped

SEQ ID NO: 2603 - RNA, 13 nt, synthetic construct
  source 1..13: mol_type = other RNA
caaagttttcttt

SEQ ID NO: 2604 - RNA, 12 nt, synthetic construct
  source 1..12: mol_type = other RNA
agtaaaaaagat

SEQ ID NO: 2605 - RNA, 12 nt, synthetic construct
  source 1..12: mol_type = other RNA
actgggtcttta

SEQ ID NO: 2606 - RNA, 14 nt, synthetic construct
  source 1..14: mol_type = other RNA
aacctggaaacacc

SEQ ID NO: 2607 - RNA, 12 nt, synthetic construct
  source 1..12: mol_type = other RNA
aggaaatatttt

SEQ ID NO: 2608 - RNA, 12 nt, synthetic construct
  source 1..12: mol_type = other RNA
aatggagatatt

SEQ ID NO: 2609 - RNA, 12 nt, synthetic construct
  source 1..12: mol_type = other RNA
aacttggaaaca

SEQ ID NO: 2610-2611 - skipped (2 entries)

SEQ ID NO: 2612 - RNA, 12 nt, synthetic construct
  source 1..12: mol_type = other RNA
gttgatgatgat

SEQ ID NO: 2613 - RNA, 12 nt, synthetic construct
  source 1..12: mol_type = other RNA
tatgagatattt

SEQ ID NO: 2614 - RNA, 14 nt, synthetic construct
  source 1..14: mol_type = other RNA
tgttttccaaagat

SEQ ID NO: 2615 - RNA, 14 nt, synthetic construct
  source 1..14: mol_type = other RNA
aaaaaatattttct

SEQ ID NO: 2616 - RNA, 12 nt, synthetic construct
  source 1..12: mol_type = other RNA
tgggtattttct

SEQ ID NO: 2617 - RNA, 13 nt, synthetic construct
  source 1..13: mol_type = other RNA
ggggattttcttt

SEQ ID NO: 2618 - RNA, 14 nt, synthetic construct
  source 1..14: mol_type = other RNA
gttgataagatgat

SEQ ID NO: 2619 - RNA, 11 nt, synthetic construct
  source 1..11: mol_type = other RNA
caaagtttctt

SEQ ID NO: 2620 - RNA, 14 nt, synthetic construct
  source 1..14: mol_type = other RNA
aggagacaccaaag

SEQ ID NO: 2621 - RNA, 12 nt, synthetic construct
  source 1..12: mol_type = other RNA
aacttgaaacac

SEQ ID NO: 2622 - RNA, 10 nt, synthetic construct
  source 1..10: mol_type = other RNA
agtgcaccaa

SEQ ID NO: 2623 - RNA, 12 nt, synthetic construct
  source 1..12: mol_type = other RNA
aaaaaattttct

SEQ ID NO: 2624 - RNA, 13 nt, synthetic construct
  source 1..13: mol_type = other RNA
taaagataggaaa

SEQ ID NO: 2625 - RNA, 14 nt, synthetic construct
  source 1..14: mol_type = other RNA
gtctttccaaagat

SEQ ID NO: 2626 - skipped

SEQ ID NO: 2627 - RNA, 13 nt, synthetic construct
  source 1..13: mol_type = other RNA
cagagtattttct

SEQ ID NO: 2628 - RNA, 13 nt, synthetic construct
  source 1..13: mol_type = other RNA
gggaaattttctt

SEQ ID NO: 2629 - RNA, 11 nt, synthetic construct
  source 1..11: mol_type = other RNA
cgaggattttc

SEQ ID NO: 2630 - skipped

SEQ ID NO: 2631 - RNA, 13 nt, synthetic construct
  source 1..13: mol_type = other RNA
caaagataggaaa

SEQ ID NO: 2632 - RNA, 12 nt, synthetic construct
  source 1..12: mol_type = other RNA
aggtgaaccaaa

SEQ ID NO: 2633 - RNA, 11 nt, synthetic construct
  source 1..11: mol_type = other RNA
caacgtgatat

SEQ ID NO: 2634 - RNA, 14 nt, synthetic construct
  source 1..14: mol_type = other RNA
aaaacgttttcttt

SEQ ID NO: 2635 - RNA, 10 nt, synthetic construct
  source 1..10: mol_type = other RNA
aaacgatgat

SEQ ID NO: 2636 - RNA, 13 nt, synthetic construct
  source 1..13: mol_type = other RNA
ctggaaacaccaa

SEQ ID NO: 2637 - RNA, 14 nt, synthetic construct
  source 1..14: mol_type = other RNA
acttggaaacacca

SEQ ID NO: 2638 - RNA, 14 nt, synthetic construct
  source 1..14: mol_type = other RNA
aaactttaggaaac

SEQ ID NO: 2639 - RNA, 14 nt, synthetic construct
  source 1..14: mol_type = other RNA
aggaagccaaagat

SEQ ID NO: 2640 - RNA, 12 nt, synthetic construct
  source 1..12: mol_type = other RNA
agtaaccaaaga

SEQ ID NO: 2641 - RNA, 13 nt, synthetic construct
  source 1..13: mol_type = other RNA
ctggaaccaaaga

SEQ ID NO: 2642 - RNA, 12 nt, synthetic construct
  source 1..12: mol_type = other RNA
aggagacaaaga

SEQ ID NO: 2643 - RNA, 10 nt, synthetic construct
  source 1..10: mol_type = other RNA
aacctttaat

SEQ ID NO: 2644 - RNA, 14 nt, synthetic construct
  source 1..14: mol_type = other RNA
acgccctaggaaac

SEQ ID NO: 2645 - skipped

SEQ ID NO: 2646 - RNA, 14 nt, synthetic construct
  source 1..14: mol_type = other RNA
tttattagatgata

SEQ ID NO: 2647 - RNA, 12 nt, synthetic construct
  source 1..12: mol_type = other RNA
acttggaaacac

SEQ ID NO: 2648 - RNA, 12 nt, synthetic construct
  source 1..12: mol_type = other RNA
aaactattttct

SEQ ID NO: 2649 - RNA, 12 nt, synthetic construct
  source 1..12: mol_type = other RNA
aggagatttaat

SEQ ID NO: 2650 - RNA, 14 nt, synthetic construct
  source 1..14: mol_type = other RNA
gcccccggaaacac

SEQ ID NO: 2651 - RNA, 12 nt, synthetic construct
  source 1..12: mol_type = other RNA
ttgaggtatttt

SEQ ID NO: 2652 - RNA, 14 nt, synthetic construct
  source 1..14: mol_type = other RNA
tggaagttctttaa

SEQ ID NO: 2653 - RNA, 12 nt, synthetic construct
  source 1..12: mol_type = other RNA
accgtttcttta

SEQ ID NO: 2654 - RNA, 11 nt, synthetic construct
  source 1..11: mol_type = other RNA
caaagttcttt

SEQ ID NO: 2655 - RNA, 11 nt, synthetic construct
  source 1..11: mol_type = other RNA
tggagacacca

SEQ ID NO: 2656 - RNA, 11 nt, synthetic construct
  source 1..11: mol_type = other RNA
gtgtttcttta

SEQ ID NO: 2657 - skipped

SEQ ID NO: 2658 - RNA, 11 nt, synthetic construct
  source 1..11: mol_type = other RNA
caactgatgat

SEQ ID NO: 2659 - RNA, 10 nt, synthetic construct
  source 1..10: mol_type = other RNA
aaaaaagatg

SEQ ID NO: 2660 - skipped

SEQ ID NO: 2661 - RNA, 12 nt, synthetic construct
  source 1..12: mol_type = other RNA
aaaatctttaat

SEQ ID NO: 2662 - RNA, 12 nt, synthetic construct
  source 1..12: mol_type = other RNA
agtggaatgata

SEQ ID NO: 2663 - RNA, 14 nt, synthetic construct
  source 1..14: mol_type = other RNA
accccgaaacacca

SEQ ID NO: 2664 - RNA, 12 nt, synthetic construct
  source 1..12: mol_type = other RNA
tggaaaaagatg

SEQ ID NO: 2665 - RNA, 12 nt, synthetic construct
  source 1..12: mol_type = other RNA
tggaagttcttt

SEQ ID NO: 2666 - RNA, 11 nt, synthetic construct
  source 1..11: mol_type = other RNA
cgtcgcaaaga

SEQ ID NO: 2667 - RNA, 12 nt, synthetic construct
  source 1..12: mol_type = other RNA
aaagggaaagat

SEQ ID NO: 2668 - skipped

SEQ ID NO: 2669 - RNA, 10 nt, synthetic construct
  source 1..10: mol_type = other RNA
aaaattttct

SEQ ID NO: 2670 - RNA, 14 nt, synthetic construct
  source 1..14: mol_type = other RNA
accctaaggaaaca

SEQ ID NO: 2671 - RNA, 12 nt, synthetic construct
  source 1..12: mol_type = other RNA
attgtaatgata

SEQ ID NO: 2672 - RNA, 12 nt, synthetic construct
  source 1..12: mol_type = other RNA
aaagttcatagg

SEQ ID NO: 2673 - RNA, 12 nt, synthetic construct
  source 1..12: mol_type = other RNA
gcgggaattttc

SEQ ID NO: 2674 - RNA, 12 nt, synthetic construct
  source 1..12: mol_type = other RNA
gaccgccatagg

SEQ ID NO: 2675 - RNA, 14 nt, synthetic construct
  source 1..14: mol_type = other RNA
tgtaggatattttc

SEQ ID NO: 2676 - skipped

SEQ ID NO: 2677 - RNA, 12 nt, synthetic construct
  source 1..12: mol_type = other RNA
aagggaaagatg

SEQ ID NO: 2678 - RNA, 12 nt, synthetic construct
  source 1..12: mol_type = other RNA
aaaaatattttc

SEQ ID NO: 2679 - RNA, 12 nt, synthetic construct
  source 1..12: mol_type = other RNA
aaaaggaaagat

SEQ ID NO: 2680 - RNA, 12 nt, synthetic construct
  source 1..12: mol_type = other RNA
aaacccatagga

SEQ ID NO: 2681 - RNA, 12 nt, synthetic construct
  source 1..12: mol_type = other RNA
attagcgatatt

SEQ ID NO: 2682 - RNA, 14 nt, synthetic construct
  source 1..14: mol_type = other RNA
tgttttcaaagatg

SEQ ID NO: 2683 - RNA, 14 nt, synthetic construct
  source 1..14: mol_type = other RNA
aggagacataggaa

SEQ ID NO: 2684 - RNA, 13 nt, synthetic construct
  source 1..13: mol_type = other RNA
caacggatatttt

SEQ ID NO: 2685 - RNA, 11 nt, synthetic construct
  source 1..11: mol_type = other RNA
cgaattaggaa

SEQ ID NO: 2686 - RNA, 14 nt, synthetic construct
  source 1..14: mol_type = other RNA
tttctaaaacacca

SEQ ID NO: 2687 - RNA, 12 nt, synthetic construct
  source 1..12: mol_type = other RNA
aggagacatagg

SEQ ID NO: 2688 - DNA, 58 bp, synthetic construct
  source 1..58: mol_type = other DNA
acactctttccctacacgacgctcttccgatctnnnnactggagccttcagagggtaa

SEQ ID NO: 2689 - DNA, 51 bp, synthetic construct
  source 1..51: mol_type = other DNA
tggagttcagacgtgtgctcttccgatctaaccgattgaatatggagccaa

SEQ ID NO: 2690 - RNA, 33 nt, synthetic construct
  source 1..33: mol_type = other RNA
tcaaggaaaacatcatcttcggtgtatcgtacg

SEQ ID NO: 2691 - RNA, 33 nt, synthetic construct
  source 1..33: mol_type = other RNA
tcaaggaaaacatcatcttcggtgtttcgtacg

SEQ ID NO: 2692 - RNA, 33 nt, synthetic construct
  source 1..33: mol_type = other RNA
ttaaggaaaacatcatcttcggtgtatcgtacg

SEQ ID NO: 2693 - RNA, 33 nt, synthetic construct
  source 1..33: mol_type = other RNA
tcaaggaaaacatcatctttggtgtatcgtacg

SEQ ID NO: 2694 - RNA, 33 nt, synthetic construct
  source 1..33: mol_type = other RNA
tcaaggaaaatatcatcttcggtgtatcgtacg

SEQ ID NO: 2695 - RNA, 33 nt, synthetic construct
  source 1..33: mol_type = other RNA
ttaaggaaaacatcatcttcggtgtttcgtacg

SEQ ID NO: 2696 - RNA, 33 nt, synthetic construct
  source 1..33: mol_type = other RNA
tcaaggaaaacatcatctttggtgtttcgtacg

SEQ ID NO: 2697 - RNA, 33 nt, synthetic construct
  source 1..33: mol_type = other RNA
tcaaagaaaacatcatcttcggtgtatcgtacg

SEQ ID NO: 2698 - RNA, 33 nt, synthetic construct
  source 1..33: mol_type = other RNA
tcaaggaaaatatcatcttcggtgtttcgtacg

SEQ ID NO: 2699 - RNA, 33 nt, synthetic construct
  source 1..33: mol_type = other RNA
ttaaggaaaacatcatctttggtgtatcgtacg

SEQ ID NO: 2700 - RNA, 33 nt, synthetic construct
  source 1..33: mol_type = other RNA
tcaaggaaaacatcatcttcggtgtatcgtatg

SEQ ID NO: 2701 - RNA, 33 nt, synthetic construct
  source 1..33: mol_type = other RNA
ttaaggaaaatatcatcttcggtgtatcgtacg

SEQ ID NO: 2702 - RNA, 33 nt, synthetic construct
  source 1..33: mol_type = other RNA
tcaaagaaaacatcatcttcggtgtttcgtacg

SEQ ID NO: 2703 - RNA, 33 nt, synthetic construct
  source 1..33: mol_type = other RNA
tcaaggaaaatatcatctttggtgtatcgtacg

SEQ ID NO: 2704 - RNA, 33 nt, synthetic construct
  source 1..33: mol_type = other RNA
ttaaggaaaacatcatctttggtgtttcgtacg

SEQ ID NO: 2705 - RNA, 33 nt, synthetic construct
  source 1..33: mol_type = other RNA
tcaaggaaaacatcatcttcggtgtttcgtatg

SEQ ID NO: 2706 - RNA, 33 nt, synthetic construct
  source 1..33: mol_type = other RNA
ttaaagaaaacatcatcttcggtgtatcgtacg

SEQ ID NO: 2707 - RNA, 33 nt, synthetic construct
  source 1..33: mol_type = other RNA
ttaaggaaaatatcatcttcggtgtttcgtacg

SEQ ID NO: 2708 - RNA, 33 nt, synthetic construct
  source 1..33: mol_type = other RNA
tcaaggaaaacatcatcttcggtgtatcctacg

SEQ ID NO: 2709 - RNA, 33 nt, synthetic construct
  source 1..33: mol_type = other RNA
ttaaggaaaacatcatcttcggtgtatcgtatg

SEQ ID NO: 2710 - RNA, 33 nt, synthetic construct
  source 1..33: mol_type = other RNA
tcaaagaaaacatcatctttggtgtatcgtacg

SEQ ID NO: 2711 - RNA, 33 nt, synthetic construct
  source 1..33: mol_type = other RNA
tcaaggaaaatatcatctttggtgtttcgtacg

SEQ ID NO: 2712 - RNA, 33 nt, synthetic construct
  source 1..33: mol_type = other RNA
tcaaagaaaatatcatcttcggtgtatcgtacg

SEQ ID NO: 2713 - RNA, 33 nt, synthetic construct
  source 1..33: mol_type = other RNA
ttaaagaaaacatcatcttcggtgtttcgtacg

SEQ ID NO: 2714 - RNA, 33 nt, synthetic construct
  source 1..33: mol_type = other RNA
tcaaggaaaacatcatctttggtgtatcgtatg

SEQ ID NO: 2715 - RNA, 33 nt, synthetic construct
  source 1..33: mol_type = other RNA
tcaaggaaaacatcatcttcggtgtttcctacg

SEQ ID NO: 2716 - RNA, 33 nt, synthetic construct
  source 1..33: mol_type = other RNA
ttaaggaaaatatcatctttggtgtatcgtacg

SEQ ID NO: 2717 - RNA, 33 nt, synthetic construct
  source 1..33: mol_type = other RNA
tcaaggaaaatatcatcttcggtgtatcgtatg

SEQ ID NO: 2718 - RNA, 33 nt, synthetic construct
  source 1..33: mol_type = other RNA
ttaaggaaaacatcatcttcggtgtttcgtatg

SEQ ID NO: 2719 - RNA, 33 nt, synthetic construct
  source 1..33: mol_type = other RNA
tcaaagaaaacatcatctttggtgtttcgtacg

SEQ ID NO: 2720 - RNA, 33 nt, synthetic construct
  source 1..33: mol_type = other RNA
ttaaggaaaacatcatcttcggtgtatcctacg

SEQ ID NO: 2721 - RNA, 33 nt, synthetic construct
  source 1..33: mol_type = other RNA
tcaaagaaaatatcatcttcggtgtttcgtacg

SEQ ID NO: 2722 - RNA, 33 nt, synthetic construct
  source 1..33: mol_type = other RNA
tcaaggaaaacatcatctttggtgtttcgtatg

SEQ ID NO: 2723 - RNA, 33 nt, synthetic construct
  source 1..33: mol_type = other RNA
ttaaagaaaacatcatctttggtgtatcgtacg

SEQ ID NO: 2724 - RNA, 33 nt, synthetic construct
  source 1..33: mol_type = other RNA
tcaaagaaaacatcatcttcggtgtatcgtatg

SEQ ID NO: 2725 - RNA, 33 nt, synthetic construct
  source 1..33: mol_type = other RNA
ttaaggaaaatatcatctttggtgtttcgtacg

SEQ ID NO: 2726 - RNA, 33 nt, synthetic construct
  source 1..33: mol_type = other RNA
tcaaggaaaacatcatctttggtgtatcctacg

SEQ ID NO: 2727 - RNA, 33 nt, synthetic construct
  source 1..33: mol_type = other RNA
tcaaggaaaatatcatcttcggtgtttcgtatg

SEQ ID NO: 2728 - RNA, 33 nt, synthetic construct
  source 1..33: mol_type = other RNA
ttaaagaaaatatcatcttcggtgtatcgtacg

SEQ ID NO: 2729 - RNA, 33 nt, synthetic construct
  source 1..33: mol_type = other RNA
ttaaggaaaacatcatctttggtgtatcgtatg

SEQ ID NO: 2730 - RNA, 33 nt, synthetic construct
  source 1..33: mol_type = other RNA
tcaaggaaaatatcatcttcggtgtatcctacg

SEQ ID NO: 2731 - RNA, 33 nt, synthetic construct
  source 1..33: mol_type = other RNA
ttaaggaaaacatcatcttcggtgtttcctacg

SEQ ID NO: 2732 - RNA, 33 nt, synthetic construct
  source 1..33: mol_type = other RNA
ttaaggaaaatatcatcttcggtgtatcgtatg

SEQ ID NO: 2733 - RNA, 33 nt, synthetic construct
  source 1..33: mol_type = other RNA
tcaaagaaaatatcatctttggtgtatcgtacg

SEQ ID NO: 2734 - RNA, 33 nt, synthetic construct
  source 1..33: mol_type = other RNA
ttaaagaaaacatcatctttggtgtttcgtacg

SEQ ID NO: 2735 - RNA, 33 nt, synthetic construct
  source 1..33: mol_type = other RNA
tcaaagaaaacatcatcttcggtgtttcgtatg

SEQ ID NO: 2736 - RNA, 33 nt, synthetic construct
  source 1..33: mol_type = other RNA
tcaaggaaaacatcatctttggtgtttcctacg

SEQ ID NO: 2737 - RNA, 33 nt, synthetic construct
  source 1..33: mol_type = other RNA
ttaaagaaaatatcatcttcggtgtttcgtacg

SEQ ID NO: 2738 - RNA, 33 nt, synthetic construct
  source 1..33: mol_type = other RNA
tcaaagaaaacatcatcttcggtgtatcctacg

SEQ ID NO: 2739 - RNA, 33 nt, synthetic construct
  source 1..33: mol_type = other RNA
tcaaggaaaatatcatctttggtgtatcgtatg

SEQ ID NO: 2740 - RNA, 33 nt, synthetic construct
  source 1..33: mol_type = other RNA
ttaaggaaaacatcatctttggtgtttcgtatg

SEQ ID NO: 2741 - RNA, 33 nt, synthetic construct
  source 1..33: mol_type = other RNA
ttaaagaaaacatcatcttcggtgtatcgtatg

SEQ ID NO: 2742 - RNA, 33 nt, synthetic construct
  source 1..33: mol_type = other RNA
tcaaggaaaatatcatcttcggtgtttcctacg

SEQ ID NO: 2743 - RNA, 33 nt, synthetic construct
  source 1..33: mol_type = other RNA
ttaaggaaaacatcatctttggtgtatcctacg

SEQ ID NO: 2744 - RNA, 33 nt, synthetic construct
  source 1..33: mol_type = other RNA
ttaaggaaaatatcatcttcggtgtttcgtatg

SEQ ID NO: 2745 - RNA, 33 nt, synthetic construct
  source 1..33: mol_type = other RNA
tcaaggaaaacatcatcttcggtgtatcctatg

SEQ ID NO: 2746 - RNA, 33 nt, synthetic construct
  source 1..33: mol_type = other RNA
tcaaagaaaatatcatctttggtgtttcgtacg

SEQ ID NO: 2747 - RNA, 33 nt, synthetic construct
  source 1..33: mol_type = other RNA
ttaaggaaaatatcatcttcggtgtatcctacg

SEQ ID NO: 2748 - RNA, 33 nt, synthetic construct
  source 1..33: mol_type = other RNA
tcaaagaaaacatcatctttggtgtatcgtatg

SEQ ID NO: 2749 - RNA, 33 nt, synthetic construct
  source 1..33: mol_type = other RNA
tcaaagaaaacatcatcttcggtgtttcctacg

SEQ ID NO: 2750 - RNA, 33 nt, synthetic construct
  source 1..33: mol_type = other RNA
tcaaggaaaatatcatctttggtgtttcgtatg

SEQ ID NO: 2751 - RNA, 33 nt, synthetic construct
  source 1..33: mol_type = other RNA
ttaaagaaaatatcatctttggtgtatcgtacg

SEQ ID NO: 2752 - RNA, 33 nt, synthetic construct
  source 1..33: mol_type = other RNA
tcaaagaaaatatcatcttcggtgtatcgtatg

SEQ ID NO: 2753 - RNA, 33 nt, synthetic construct
  source 1..33: mol_type = other RNA
ttaaagaaaacatcatcttcggtgtttcgtatg

SEQ ID NO: 2754 - RNA, 33 nt, synthetic construct
  source 1..33: mol_type = other RNA
tcaaggaaaatatcatctttggtgtatcctacg

SEQ ID NO: 2755 - RNA, 33 nt, synthetic construct
  source 1..33: mol_type = other RNA
ttaaggaaaacatcatctttggtgtttcctacg

SEQ ID NO: 2756 - RNA, 33 nt, synthetic construct
  source 1..33: mol_type = other RNA
tcaaggaaaacatcatcttcggtgtttcctatg

SEQ ID NO: 2757 - RNA, 33 nt, synthetic construct
  source 1..33: mol_type = other RNA
ttaaagaaaacatcatcttcggtgtatcctacg

SEQ ID NO: 2758 - RNA, 33 nt, synthetic construct
  source 1..33: mol_type = other RNA
ttaaggaaaatatcatctttggtgtatcgtatg

SEQ ID NO: 2759 - RNA, 33 nt, synthetic construct
  source 1..33: mol_type = other RNA
ttaaggaaaatatcatcttcggtgtttcctacg

SEQ ID NO: 2760 - RNA, 33 nt, synthetic construct
  source 1..33: mol_type = other RNA
tcaaagaaaacatcatctttggtgtttcgtatg

SEQ ID NO: 2761 - RNA, 33 nt, synthetic construct
  source 1..33: mol_type = other RNA
ttaaggaaaacatcatcttcggtgtatcctatg

SEQ ID NO: 2762 - RNA, 33 nt, synthetic construct
  source 1..33: mol_type = other RNA
ttaaagaaaatatcatctttggtgtttcgtacg

SEQ ID NO: 2763 - RNA, 21 nt, synthetic construct
  source 1..21: mol_type = other RNA
ttaaggagaacataatattcg

SEQ ID NO: 2764 - RNA, 33 nt, synthetic construct
  source 1..33: mol_type = other RNA
tcaaagaaaacatcatctttggtgtatcctacg

SEQ ID NO: 2765 - RNA, 21 nt, synthetic construct
  source 1..21: mol_type = other RNA
ttaaggagaatataatattcg

SEQ ID NO: 2766 - RNA, 33 nt, synthetic construct
  source 1..33: mol_type = other RNA
tcaaagaaaatatcatcttcggtgtttcgtatg

SEQ ID NO: 2767 - RNA, 21 nt, synthetic construct
  source 1..21: mol_type = other RNA
ttaaggaaaacataatattcg

SEQ ID NO: 2768 - RNA, 33 nt, synthetic construct
  source 1..33: mol_type = other RNA
ttaaagaaaacatcatctttggtgtatcgtatg

SEQ ID NO: 2769 - RNA, 21 nt, synthetic construct
  source 1..21: mol_type = other RNA
ttaaggaaaatataatattcg

SEQ ID NO: 2770 - RNA, 33 nt, synthetic construct
  source 1..33: mol_type = other RNA
tcaaggaaaatatcatctttggtgtttcctacg

SEQ ID NO: 2771 - RNA, 21 nt, synthetic construct
  source 1..21: mol_type = other RNA
ttaaagagaacataatattcg

SEQ ID NO: 2772 - RNA, 33 nt, synthetic construct
  source 1..33: mol_type = other RNA
tcaaagaaaatatcatcttcggtgtatcctacg

SEQ ID NO: 2773 - RNA, 21 nt, synthetic construct
  source 1..21: mol_type = other RNA
ttaaagagaatataatattcg

SEQ ID NO: 2774 - RNA, 33 nt, synthetic construct
  source 1..33: mol_type = other RNA
ttaaagaaaacatcatcttcggtgtttcctacg

SEQ ID NO: 2775 - RNA, 21 nt, synthetic construct
  source 1..21: mol_type = other RNA
ttaaggagaacataatcttcg

SEQ ID NO: 2776 - RNA, 33 nt, synthetic construct
  source 1..33: mol_type = other RNA
ttaaggaaaatatcatctttggtgtttcgtatg

SEQ ID NO: 2777 - RNA, 21 nt, synthetic construct
  source 1..21: mol_type = other RNA
ttaaggagaatataatcttcg

SEQ ID NO: 2778 - RNA, 33 nt, synthetic construct
  source 1..33: mol_type = other RNA
tcaaggaaaacatcatctttggtgtatcctatg

SEQ ID NO: 2779 - RNA, 21 nt, synthetic construct
  source 1..21: mol_type = other RNA
ttaaagaaaacataatattcg

SEQ ID NO: 2780 - RNA, 33 nt, synthetic construct
  source 1..33: mol_type = other RNA
ttaaagaaaatatcatcttcggtgtatcgtatg

SEQ ID NO: 2781 - RNA, 21 nt, synthetic construct
  source 1..21: mol_type = other RNA
ttaaagaaaatataatattcg

SEQ ID NO: 2782 - RNA, 33 nt, synthetic construct
  source 1..33: mol_type = other RNA
ttaaggaaaatatcatctttggtgtatcctacg

SEQ ID NO: 2783 - RNA, 21 nt, synthetic construct
  source 1..21: mol_type = other RNA
ttaaggaaaacataatcttcg

SEQ ID NO: 2784 - RNA, 33 nt, synthetic construct
  source 1..33: mol_type = other RNA
tcaaggaaaatatcatcttcggtgtatcctatg

SEQ ID NO: 2785 - RNA, 21 nt, synthetic construct
  source 1..21: mol_type = other RNA
ttaaggaaaatataatcttcg

SEQ ID NO: 2786 - RNA, 33 nt, synthetic construct
  source 1..33: mol_type = other RNA
ttaaggaaaacatcatcttcggtgtttcctatg

SEQ ID NO: 2787 - RNA, 21 nt, synthetic construct
  source 1..21: mol_type = other RNA
ttaaagagaacataatcttcg

SEQ ID NO: 2788 - RNA, 33 nt, synthetic construct
  source 1..33: mol_type = other RNA
tcaaagaaaacatcatctttggtgtttcctacg

SEQ ID NO: 2789 - RNA, 21 nt, synthetic construct
  source 1..21: mol_type = other RNA
ttaaagagaatataatcttcg

SEQ ID NO: 2790 - RNA, 33 nt, synthetic construct
  source 1..33: mol_type = other RNA
tcaaagaaaatatcatctttggtgtatcgtatg

SEQ ID NO: 2791 - RNA, 21 nt, synthetic construct
  source 1..21: mol_type = other RNA
ttaaagaaaacataatcttcg

SEQ ID NO: 2792 - RNA, 33 nt, synthetic construct
  source 1..33: mol_type = other RNA
ttaaagaaaacatcatctttggtgtttcgtatg

SEQ ID NO: 2793 - RNA, 21 nt, synthetic construct
  source 1..21: mol_type = other RNA
ttaaagaaaatataatcttcg

SEQ ID NO: 2794 - RNA, 33 nt, synthetic construct
  source 1..33: mol_type = other RNA
tcaaagaaaatatcatcttcggtgtttcctacg

SEQ ID NO: 2795 - RNA, 21 nt, synthetic construct
  source 1..21: mol_type = other RNA
ttaaggagaacataatatttg

SEQ ID NO: 2796 - RNA, 33 nt, synthetic construct
  source 1..33: mol_type = other RNA
tcaaggaaaacatcatctttggtgtttcctatg

SEQ ID NO: 2797 - RNA, 21 nt, synthetic construct
  source 1..21: mol_type = other RNA
ttaaggagaatataatatttg

SEQ ID NO: 2798 - RNA, 33 nt, synthetic construct
  source 1..33: mol_type = other RNA
ttaaagaaaacatcatctttggtgtatcctacg

SEQ ID NO: 2799 - RNA, 21 nt, synthetic construct
  source 1..21: mol_type = other RNA
ttaaggagaacatcatattcg

SEQ ID NO: 2800 - RNA, 33 nt, synthetic construct
  source 1..33: mol_type = other RNA
ttaaagaaaatatcatcttcggtgtttcgtatg

SEQ ID NO: 2801 - RNA, 21 nt, synthetic construct
  source 1..21: mol_type = other RNA
ttaaggagaatatcatattcg

SEQ ID NO: 2802 - RNA, 33 nt, synthetic construct
  source 1..33: mol_type = other RNA
tcaaagaaaacatcatcttcggtgtatcctatg

SEQ ID NO: 2803 - RNA, 21 nt, synthetic construct
  source 1..21: mol_type = other RNA
ttaaggaaaacataatatttg

SEQ ID NO: 2804 - RNA, 33 nt, synthetic construct
  source 1..33: mol_type = other RNA
ttaaggaaaatatcatctttggtgtttcctacg

SEQ ID NO: 2805 - RNA, 21 nt, synthetic construct
  source 1..21: mol_type = other RNA
ttaaggaaaatataatatttg

SEQ ID NO: 2806 - RNA, 33 nt, synthetic construct
  source 1..33: mol_type = other RNA
tcaaggaaaatatcatcttcggtgtttcctatg

SEQ ID NO: 2807 - RNA, 21 nt, synthetic construct
  source 1..21: mol_type = other RNA
ttaaggaaaacatcatattcg

SEQ ID NO: 2808 - RNA, 33 nt, synthetic construct
  source 1..33: mol_type = other RNA
ttaaagaaaatatcatcttcggtgtatcctacg

SEQ ID NO: 2809 - RNA, 21 nt, synthetic construct
  source 1..21: mol_type = other RNA
ttaaggaaaatatcatattcg

SEQ ID NO: 2810 - RNA, 33 nt, synthetic construct
  source 1..33: mol_type = other RNA
ttaaggaaaacatcatctttggtgtatcctatg

SEQ ID NO: 2811 - RNA, 21 nt, synthetic construct
  source 1..21: mol_type = other RNA
ttaaagagaacataatatttg

SEQ ID NO: 2812 - RNA, 33 nt, synthetic construct
  source 1..33: mol_type = other RNA
tcaaagaaaatatcatctttggtgtttcgtatg

SEQ ID NO: 2813 - RNA, 21 nt, synthetic construct
  source 1..21: mol_type = other RNA
ttaaagagaatataatatttg

SEQ ID NO: 2814 - RNA, 33 nt, synthetic construct
  source 1..33: mol_type = other RNA
ttaaggaaaatatcatcttcggtgtatcctatg

SEQ ID NO: 2815 - RNA, 21 nt, synthetic construct
  source 1..21: mol_type = other RNA
ttaaagagaacatcatattcg

SEQ ID NO: 2816 - RNA, 33 nt, synthetic construct
  source 1..33: mol_type = other RNA
tcaaagaaaatatcatctttggtgtatcctacg

SEQ ID NO: 2817 - RNA, 21 nt, synthetic construct
  source 1..21: mol_type = other RNA
ttaaggagaacataatctttg

SEQ ID NO: 2818 - RNA, 33 nt, synthetic construct
  source 1..33: mol_type = other RNA
ttaaagaaaacatcatctttggtgtttcctacg

SEQ ID NO: 2819 - RNA, 21 nt, synthetic construct
  source 1..21: mol_type = other RNA
ttaaagagaatatcatattcg

SEQ ID NO: 2820 - RNA, 33 nt, synthetic construct
  source 1..33: mol_type = other RNA
tcaaagaaaacatcatcttcggtgtttcctatg

SEQ ID NO: 2821 - RNA, 21 nt, synthetic construct
  source 1..21: mol_type = other RNA
ttaaggagaatataatctttg

SEQ ID NO: 2822 - RNA, 33 nt, synthetic construct
  source 1..33: mol_type = other RNA
ttaaagaaaatatcatctttggtgtatcgtatg

SEQ ID NO: 2823 - RNA, 21 nt, synthetic construct
  source 1..21: mol_type = other RNA
ttaaggagaacatcatcttcg

SEQ ID NO: 2824 - RNA, 33 nt, synthetic construct
  source 1..33: mol_type = other RNA
ttaaagaaaatatcatcttcggtgtttcctacg

SEQ ID NO: 2825 - RNA, 21 nt, synthetic construct
  source 1..21: mol_type = other RNA
ttaaggagaatatcatcttcg

SEQ ID NO: 2826 - RNA, 33 nt, synthetic construct
  source 1..33: mol_type = other RNA
tcaaggaaaatatcatctttggtgtatcctatg

SEQ ID NO: 2827 - RNA, 21 nt, synthetic construct
  source 1..21: mol_type = other RNA
ttaaagaaaacataatatttg

SEQ ID NO: 2828 - RNA, 33 nt, synthetic construct
  source 1..33: mol_type = other RNA
ttaaggaaaacatcatctttggtgtttcctatg

SEQ ID NO: 2829 - RNA, 21 nt, synthetic construct
  source 1..21: mol_type = other RNA
ttaaagaaaatataatatttg

SEQ ID NO: 2830 - RNA, 33 nt, synthetic construct
  source 1..33: mol_type = other RNA
ttaaagaaaacatcatcttcggtgtatcctatg

SEQ ID NO: 2831 - RNA, 21 nt, synthetic construct
  source 1..21: mol_type = other RNA
ttaaagaaaacatcatattcg

SEQ ID NO: 2832 - RNA, 33 nt, synthetic construct
  source 1..33: mol_type = other RNA
ttaaggaaaatatcatcttcggtgtttcctatg

SEQ ID NO: 2833 - RNA, 21 nt, synthetic construct
  source 1..21: mol_type = other RNA
ttaaggaaaacataatctttg

SEQ ID NO: 2834 - RNA, 33 nt, synthetic construct
  source 1..33: mol_type = other RNA
tcaaagaaaatatcatctttggtgtttcctacg

SEQ ID NO: 2835 - RNA, 21 nt, synthetic construct
  source 1..21: mol_type = other RNA
ttaaagaaaatatcatattcg

SEQ ID NO: 2836 - RNA, 33 nt, synthetic construct
  source 1..33: mol_type = other RNA
tcaaagaaaacatcatctttggtgtatcctatg

SEQ ID NO: 2837 - RNA, 21 nt, synthetic construct
  source 1..21: mol_type = other RNA
ttaaggaaaatataatctttg

SEQ ID NO: 2838 - RNA, 33 nt, synthetic construct
  source 1..33: mol_type = other RNA
tcaaggaaaatatcatctttggtgtttcctatg

SEQ ID NO: 2839 - RNA, 21 nt, synthetic construct
  source 1..21: mol_type = other RNA
ttaaggaaaacatcatcttcg

SEQ ID NO: 2840 - RNA, 33 nt, synthetic construct
  source 1..33: mol_type = other RNA
ttaaagaaaatatcatctttggtgtatcctacg

SEQ ID NO: 2841 - RNA, 21 nt, synthetic construct
  source 1..21: mol_type = other RNA
ttaaggaaaatatcatcttcg

SEQ ID NO: 2842 - RNA, 33 nt, synthetic construct
  source 1..33: mol_type = other RNA
tcaaagaaaatatcatcttcggtgtatcctatg

SEQ ID NO: 2843 - RNA, 21 nt, synthetic construct
  source 1..21: mol_type = other RNA
ttaaagagaacataatctttg

SEQ ID NO: 2844 - RNA, 33 nt, synthetic construct
  source 1..33: mol_type = other RNA
ttaaagaaaacatcatcttcggtgtttcctatg

SEQ ID NO: 2845 - RNA, 21 nt, synthetic construct
  source 1..21: mol_type = other RNA
ttaaagagaatataatctttg

SEQ ID NO: 2846 - RNA, 33 nt, synthetic construct
  source 1..33: mol_type = other RNA
ttaaggaaaatatcatctttggtgtatcctatg

SEQ ID NO: 2847 - RNA, 21 nt, synthetic construct
  source 1..21: mol_type = other RNA
ttaaagagaacatcatcttcg

SEQ ID NO: 2848 - RNA, 33 nt, synthetic construct
  source 1..33: mol_type = other RNA
tcaaagaaaacatcatctttggtgtttcctatg

SEQ ID NO: 2849 - RNA, 21 nt, synthetic construct
  source 1..21: mol_type = other RNA
ttaaagagaatatcatcttcg

SEQ ID NO: 2850 - RNA, 33 nt, synthetic construct
  source 1..33: mol_type = other RNA
tcaaagaaaatatcatcttcggtgtttcctatg

SEQ ID NO: 2851 - RNA, 21 nt, synthetic construct
  source 1..21: mol_type = other RNA
ttaaagaaaacataatctttg

SEQ ID NO: 2852 - RNA, 33 nt, synthetic construct
  source 1..33: mol_type = other RNA
ttaaagaaaacatcatctttggtgtatcctatg

SEQ ID NO: 2853 - RNA, 21 nt, synthetic construct
  source 1..21: mol_type = other RNA
ttaaagaaaatataatctttg

SEQ ID NO: 2854 - RNA, 33 nt, synthetic construct
  source 1..33: mol_type = other RNA
ttaaagaaaatatcatcttcggtgtatcctatg

SEQ ID NO: 2855 - RNA, 21 nt, synthetic construct
  source 1..21: mol_type = other RNA
ttaaagaaaacatcatcttcg

SEQ ID NO: 2856 - RNA, 33 nt, synthetic construct
  source 1..33: mol_type = other RNA
tcaaagaaaatatcatctttggtgtatcctatg

SEQ ID NO: 2857 - RNA, 21 nt, synthetic construct
  source 1..21: mol_type = other RNA
ttaaagaaaatatcatcttcg

SEQ ID NO: 2858 - RNA, 47 nt, synthetic construct
  source 1..47: mol_type = other RNA
tatgccggggaccatcaaagagaatatcatctttggtgtctcgtacg

SEQ ID NO: 2859 - RNA, 21 nt, synthetic construct
  source 1..21: mol_type = other RNA
ttaaggagaacatcatatttg

SEQ ID NO: 2860 - RNA, 47 nt, synthetic construct
  source 1..47: mol_type = other RNA
tatgcctgggaccatcaaagagaatatcatctttggtgtctcgtacg

SEQ ID NO: 2861 - RNA, 21 nt, synthetic construct
  source 1..21: mol_type = other RNA
ttaaggagaatatcatatttg

SEQ ID NO: 2862 - RNA, 47 nt, synthetic construct
  source 1..47: mol_type = other RNA
tatgccggggaccattaaagagaatatcatctttggtgtctcgtacg

SEQ ID NO: 2863 - RNA, 21 nt, synthetic construct
  source 1..21: mol_type = other RNA
ttaaggaaaacatcatatttg

SEQ ID NO: 2864 - RNA, 47 nt, synthetic construct
  source 1..47: mol_type = other RNA
tatgccggggaccatcaaagaaaatatcatctttggtgtctcgtacg

SEQ ID NO: 2865 - RNA, 21 nt, synthetic construct
  source 1..21: mol_type = other RNA
ttaaggaaaatatcatatttg

SEQ ID NO: 2866 - RNA, 47 nt, synthetic construct
  source 1..47: mol_type = other RNA
tatgccgggcaccatcaaagagaatatcatctttggtgtctcgtacg

SEQ ID NO: 2867 - RNA, 21 nt, synthetic construct
  source 1..21: mol_type = other RNA
ttaaagagaacatcatatttg

SEQ ID NO: 2868 - RNA, 47 nt, synthetic construct
  source 1..47: mol_type = other RNA
tatgccggggaccatcaaagagaatatcatctttggtgtctcgtatg

SEQ ID NO: 2869 - RNA, 21 nt, synthetic construct
  source 1..21: mol_type = other RNA
ttaaagagaatatcatatttg

SEQ ID NO: 2870 - RNA, 47 nt, synthetic construct
  source 1..47: mol_type = other RNA
tatgccggggaccatcaaagagaatatcatctttggtgtttcgtacg

SEQ ID NO: 2871 - RNA, 21 nt, synthetic construct
  source 1..21: mol_type = other RNA
ttaaggagaacatcatctttg

SEQ ID NO: 2872 - RNA, 47 nt, synthetic construct
  source 1..47: mol_type = other RNA
tatgcctgggaccattaaagagaatatcatctttggtgtctcgtacg

SEQ ID NO: 2873 - RNA, 21 nt, synthetic construct
  source 1..21: mol_type = other RNA
ttaaggagaatatcatctttg

SEQ ID NO: 2874 - RNA, 47 nt, synthetic construct
  source 1..47: mol_type = other RNA
tatgcctgggaccatcaaagaaaatatcatctttggtgtctcgtacg

SEQ ID NO: 2875 - RNA, 21 nt, synthetic construct
  source 1..21: mol_type = other RNA
ttaaagaaaatattatctttg

SEQ ID NO: 2876 - RNA, 47 nt, synthetic construct
  source 1..47: mol_type = other RNA
tatgccggggaccattaaagaaaatatcatctttggtgtctcgtacg

SEQ ID NO: 2877 - RNA, 21 nt, synthetic construct
  source 1..21: mol_type = other RNA
ttaaagaaaacatcatatttg

SEQ ID NO: 2878 - RNA, 47 nt, synthetic construct
  source 1..47: mol_type = other RNA
tatgcctggcaccatcaaagagaatatcatctttggtgtctcgtacg

SEQ ID NO: 2879 - RNA, 21 nt, synthetic construct
  source 1..21: mol_type = other RNA
ttaaagaaaatatcatatttg

SEQ ID NO: 2880 - RNA, 47 nt, synthetic construct
  source 1..47: mol_type = other RNA
tatgcctgggaccatcaaagagaatatcatctttggtgtctcgtatg

SEQ ID NO: 2881 - RNA, 21 nt, synthetic construct
  source 1..21: mol_type = other RNA
ttaaggaaaacatcatctttg

SEQ ID NO: 2882 - RNA, 47 nt, synthetic construct
  source 1..47: mol_type = other RNA
tatgcctgggaccatcaaagagaatatcatctttggtgtttcgtacg

SEQ ID NO: 2883 - RNA, 21 nt, synthetic construct
  source 1..21: mol_type = other RNA
ttaaggaaaatatcatctttg

SEQ ID NO: 2884 - RNA, 47 nt, synthetic construct
  source 1..47: mol_type = other RNA
tatgccgggcaccattaaagagaatatcatctttggtgtctcgtacg

SEQ ID NO: 2885 - RNA, 21 nt, synthetic construct
  source 1..21: mol_type = other RNA
ttaaagagaacatcatctttg

SEQ ID NO: 2886 - RNA, 47 nt, synthetic construct
  source 1..47: mol_type = other RNA
tatgccggggaccattaaagagaatatcatctttggtgtctcgtatg

SEQ ID NO: 2887 - RNA, 21 nt, synthetic construct
  source 1..21: mol_type = other RNA
ttaaagagaatatcatctttg

SEQ ID NO: 2888 - RNA, 47 nt, synthetic construct
  source 1..47: mol_type = other RNA
tatgccgggcaccatcaaagaaaatatcatctttggtgtctcgtacg

SEQ ID NO: 2889 - RNA, 21 nt, synthetic construct
  source 1..21: mol_type = other RNA
ttaaagaaaacatcatctttg

SEQ ID NO: 2890 - RNA, 47 nt, synthetic construct
  source 1..47: mol_type = other RNA
tatgccggggaccatcaaagaaaatatcatctttggtgtctcgtatg

SEQ ID NO: 2891 - RNA, 47 nt, synthetic construct
  source 1..47: mol_type = other RNA
tatgccggggaccattaaagagaatatcatctttggtgtttcgtacg

SEQ ID NO: 2892 - RNA, 21 nt, synthetic construct
  source 1..21: mol_type = other RNA
tcaaagaaaatatcatctttg

SEQ ID NO: 2893 - RNA, 47 nt, synthetic construct
  source 1..47: mol_type = other RNA
tatgccggggaccatcaaagaaaatatcatctttggtgtttcgtacg

SEQ ID NO: 2894 - RNA, 21 nt, synthetic construct
  source 1..21: mol_type = other RNA
taaaagaaaatatcatctttg

SEQ ID NO: 2895 - RNA, 47 nt, synthetic construct
  source 1..47: mol_type = other RNA
tatgccggggaccatcaaagagaatatcatctttggtgtctcctacg

SEQ ID NO: 2896 - RNA, 21 nt, synthetic construct
  source 1..21: mol_type = other RNA
ttaaagaaaatatcatttttg

SEQ ID NO: 2897 - RNA, 47 nt, synthetic construct
  source 1..47: mol_type = other RNA
tatgccgggcaccatcaaagagaatatcatctttggtgtctcgtatg

SEQ ID NO: 2898 - RNA, 47 nt, synthetic construct
  source 1..47: mol_type = other RNA
tatgccgggcaccatcaaagagaatatcatctttggtgtttcgtacg

SEQ ID NO: 2899 - RNA, 47 nt, synthetic construct
  source 1..47: mol_type = other RNA
tatgccggggaccatcaaagagaatatcatctttggtgtttcgtatg

SEQ ID NO: 2900 - RNA, 47 nt, synthetic construct
  source 1..47: mol_type = other RNA
tatgcctgggaccattaaagaaaatatcatctttggtgtctcgtacg

SEQ ID NO: 2901 - RNA, 47 nt, synthetic construct
  source 1..47: mol_type = other RNA
tatgcctggcaccattaaagagaatatcatctttggtgtctcgtacg

SEQ ID NO: 2902 - RNA, 47 nt, synthetic construct
  source 1..47: mol_type = other RNA
tatgcctgggaccattaaagagaatatcatctttggtgtctcgtatg

SEQ ID NO: 2903 - RNA, 47 nt, synthetic construct
  source 1..47: mol_type = other RNA
tatgcctggcaccatcaaagaaaatatcatctttggtgtctcgtacg

SEQ ID NO: 2904 - RNA, 47 nt, synthetic construct
  source 1..47: mol_type = other RNA
tatgcctgggaccatcaaagaaaatatcatctttggtgtctcgtatg

SEQ ID NO: 2905 - RNA, 47 nt, synthetic construct
  source 1..47: mol_type = other RNA
tatgcctgggaccattaaagagaatatcatctttggtgtttcgtacg

SEQ ID NO: 2906 - RNA, 47 nt, synthetic construct
  source 1..47: mol_type = other RNA
tatgcctgggaccatcaaagaaaatatcatctttggtgtttcgtacg

SEQ ID NO: 2907 - RNA, 47 nt, synthetic construct
  source 1..47: mol_type = other RNA
tatgccgggcaccattaaagaaaatatcatctttggtgtctcgtacg

SEQ ID NO: 2908 - RNA, 47 nt, synthetic construct
  source 1..47: mol_type = other RNA
tatgccggggaccattaaagaaaatatcatctttggtgtctcgtatg

SEQ ID NO: 2909 - RNA, 47 nt, synthetic construct
  source 1..47: mol_type = other RNA
tatgcctgggaccatcaaagagaatatcatctttggtgtctcctacg

SEQ ID NO: 2910 - RNA, 47 nt, synthetic construct
  source 1..47: mol_type = other RNA
tatgcctggcaccatcaaagagaatatcatctttggtgtctcgtatg

SEQ ID NO: 2911 - RNA, 47 nt, synthetic construct
  source 1..47: mol_type = other RNA
tatgccggggaccattaaagaaaatatcatctttggtgtttcgtacg

SEQ ID NO: 2912 - RNA, 47 nt, synthetic construct
  source 1..47: mol_type = other RNA
tatgcctggcaccatcaaagagaatatcatctttggtgtttcgtacg

SEQ ID NO: 2913 - RNA, 47 nt, synthetic construct
  source 1..47: mol_type = other RNA
tatgcctgggaccatcaaagagaatatcatctttggtgtttcgtatg

SEQ ID NO: 2914 - RNA, 47 nt, synthetic construct
  source 1..47: mol_type = other RNA
tatgccggggaccattaaagagaatatcatctttggtgtctcctacg

SEQ ID NO: 2915 - RNA, 47 nt, synthetic construct
  source 1..47: mol_type = other RNA
tatgccgggcaccattaaagagaatatcatctttggtgtctcgtatg

SEQ ID NO: 2916 - RNA, 47 nt, synthetic construct
  source 1..47: mol_type = other RNA
tatgccggggaccatcaaagaaaatatcatctttggtgtctcctacg

SEQ ID NO: 2917 - RNA, 47 nt, synthetic construct
  source 1..47: mol_type = other RNA
tatgccgggcaccatcaaagaaaatatcatctttggtgtctcgtatg

SEQ ID NO: 2918 - RNA, 47 nt, synthetic construct
  source 1..47: mol_type = other RNA
tatgccgggcaccattaaagagaatatcatctttggtgtttcgtacg

SEQ ID NO: 2919 - RNA, 47 nt, synthetic construct
  source 1..47: mol_type = other RNA
tatgccggggaccattaaagagaatatcatctttggtgtttcgtatg

SEQ ID NO: 2920 - RNA, 47 nt, synthetic construct
  source 1..47: mol_type = other RNA
tatgccgggcaccatcaaagaaaatatcatctttggtgtttcgtacg

SEQ ID NO: 2921 - RNA, 47 nt, synthetic construct
  source 1..47: mol_type = other RNA
tatgccggggaccatcaaagaaaatatcatctttggtgtttcgtatg

SEQ ID NO: 2922 - RNA, 47 nt, synthetic construct
  source 1..47: mol_type = other RNA
tatgccgggcaccatcaaagagaatatcatctttggtgtctcctacg

SEQ ID NO: 2923 - RNA, 47 nt, synthetic construct
  source 1..47: mol_type = other RNA
tatgccggggaccatcaaagagaatatcatctttggtgtctcctatg

SEQ ID NO: 2924 - RNA, 47 nt, synthetic construct
  source 1..47: mol_type = other RNA
tatgccggggaccatcaaagagaatatcatctttggtgtttcctacg

SEQ ID NO: 2925 - RNA, 47 nt, synthetic construct
  source 1..47: mol_type = other RNA
tatgccgggcaccatcaaagagaatatcatctttggtgtttcgtatg

SEQ ID NO: 2926 - RNA, 47 nt, synthetic construct
  source 1..47: mol_type = other RNA
tatgcctggcaccattaaagaaaatatcatctttggtgtctcgtacg

SEQ ID NO: 2927 - RNA, 47 nt, synthetic construct
  source 1..47: mol_type = other RNA
tatgcctgggaccattaaagaaaatatcatctttggtgtctcgtatg

SEQ ID NO: 2928 - RNA, 47 nt, synthetic construct
  source 1..47: mol_type = other RNA
tatgcctgggaccattaaagaaaatatcatctttggtgtttcgtacg

SEQ ID NO: 2929 - RNA, 47 nt, synthetic construct
  source 1..47: mol_type = other RNA
tatgcctgggaccattaaagagaatatcatctttggtgtctcctacg

SEQ ID NO: 2930 - RNA, 47 nt, synthetic construct
  source 1..47: mol_type = other RNA
tatgcctggcaccattaaagagaatatcatctttggtgtctcgtatg

SEQ ID NO: 2931 - RNA, 47 nt, synthetic construct
  source 1..47: mol_type = other RNA
tatgcctgggaccatcaaagaaaatatcatctttggtgtctcctacg

SEQ ID NO: 2932 - RNA, 47 nt, synthetic construct
  source 1..47: mol_type = other RNA
tatgcctggcaccatcaaagaaaatatcatctttggtgtctcgtatg

SEQ ID NO: 2933 - RNA, 47 nt, synthetic construct
  source 1..47: mol_type = other RNA
tatgcctggcaccattaaagagaatatcatctttggtgtttcgtacg

SEQ ID NO: 2934 - RNA, 47 nt, synthetic construct
  source 1..47: mol_type = other RNA
tatgcctgggaccattaaagagaatatcatctttggtgtttcgtatg

SEQ ID NO: 2935 - RNA, 47 nt, synthetic construct
  source 1..47: mol_type = other RNA
tatgcctggcaccatcaaagaaaatatcatctttggtgtttcgtacg

SEQ ID NO: 2936 - RNA, 47 nt, synthetic construct
  source 1..47: mol_type = other RNA
tatgcctgggaccatcaaagaaaatatcatctttggtgtttcgtatg

SEQ ID NO: 2937 - RNA, 47 nt, synthetic construct
  source 1..47: mol_type = other RNA
tatgccggggaccattaaagaaaatatcatctttggtgtctcctacg

SEQ ID NO: 2938 - RNA, 47 nt, synthetic construct
  source 1..47: mol_type = other RNA
tatgccgggcaccattaaagaaaatatcatctttggtgtctcgtatg

SEQ ID NO: 2939 - RNA, 47 nt, synthetic construct
  source 1..47: mol_type = other RNA
tatgcctggcaccatcaaagagaatatcatctttggtgtctcctacg

SEQ ID NO: 2940 - RNA, 47 nt, synthetic construct
  source 1..47: mol_type = other RNA
tatgcctgggaccatcaaagagaatatcatctttggtgtctcctatg

SEQ ID NO: 2941 - RNA, 47 nt, synthetic construct
  source 1..47: mol_type = other RNA
tatgccgggcaccattaaagaaaatatcatctttggtgtttcgtacg

SEQ ID NO: 2942 - RNA, 47 nt, synthetic construct
  source 1..47: mol_type = other RNA
tatgccggggaccattaaagaaaatatcatctttggtgtttcgtatg

SEQ ID NO: 2943 - RNA, 47 nt, synthetic construct
  source 1..47: mol_type = other RNA
tatgcctgggaccatcaaagagaatatcatctttggtgtttcctacg

SEQ ID NO: 2944 - RNA, 47 nt, synthetic construct
  source 1..47: mol_type = other RNA
tatgcctggcaccatcaaagagaatatcatctttggtgtttcgtatg

SEQ ID NO: 2945 - RNA, 47 nt, synthetic construct
  source 1..47: mol_type = other RNA
tatgccgggcaccattaaagagaatatcatctttggtgtctcctacg

SEQ ID NO: 2946 - RNA, 47 nt, synthetic construct
  source 1..47: mol_type = other RNA
tatgccggggaccattaaagagaatatcatctttggtgtctcctatg

SEQ ID NO: 2947 - RNA, 47 nt, synthetic construct
  source 1..47: mol_type = other RNA
tatgccgggcaccatcaaagaaaatatcatctttggtgtctcctacg

SEQ ID NO: 2948 - RNA, 47 nt, synthetic construct
  source 1..47: mol_type = other RNA
tatgccggggaccatcaaagaaaatatcatctttggtgtctcctatg

SEQ ID NO: 2949 - RNA, 47 nt, synthetic construct
  source 1..47: mol_type = other RNA
tatgccggggaccattaaagagaatatcatctttggtgtttcctacg

SEQ ID NO: 2950 - RNA, 47 nt, synthetic construct
  source 1..47: mol_type = other RNA
tatgccgggcaccattaaagagaatatcatctttggtgtttcgtatg

SEQ ID NO: 2951 - RNA, 47 nt, synthetic construct
  source 1..47: mol_type = other RNA
tatgccggggaccatcaaagaaaatatcatctttggtgtttcctacg

SEQ ID NO: 2952 - RNA, 47 nt, synthetic construct
  source 1..47: mol_type = other RNA
tatgccgggcaccatcaaagaaaatatcatctttggtgtttcgtatg

SEQ ID NO: 2953 - RNA, 47 nt, synthetic construct
  source 1..47: mol_type = other RNA
tatgccgggcaccatcaaagagaatatcatctttggtgtctcctatg

SEQ ID NO: 2954 - RNA, 47 nt, synthetic construct
  source 1..47: mol_type = other RNA
tatgccgggcaccatcaaagagaatatcatctttggtgtttcctacg

SEQ ID NO: 2955 - RNA, 47 nt, synthetic construct
  source 1..47: mol_type = other RNA
tatgccggggaccatcaaagagaatatcatctttggtgtttcctatg

SEQ ID NO: 2956 - RNA, 47 nt, synthetic construct
  source 1..47: mol_type = other RNA
tatgcctgggaccattaaagaaaatatcatctttggtgtctcctacg

SEQ ID NO: 2957 - RNA, 47 nt, synthetic construct
  source 1..47: mol_type = other RNA
tatgcctggcaccattaaagaaaatatcatctttggtgtctcgtatg

SEQ ID NO: 2958 - RNA, 47 nt, synthetic construct
  source 1..47: mol_type = other RNA
tatgcctggcaccattaaagaaaatatcatctttggtgtttcgtacg

SEQ ID NO: 2959 - RNA, 47 nt, synthetic construct
  source 1..47: mol_type = other RNA
tatgcctgggaccattaaagaaaatatcatctttggtgtttcgtatg

SEQ ID NO: 2960 - RNA, 47 nt, synthetic construct
  source 1..47: mol_type = other RNA
tatgcctggcaccattaaagagaatatcatctttggtgtctcctacg

SEQ ID NO: 2961 - RNA, 47 nt, synthetic construct
  source 1..47: mol_type = other RNA
tatgcctgggaccattaaagagaatatcatctttggtgtctcctatg

SEQ ID NO: 2962 - RNA, 47 nt, synthetic construct
  source 1..47: mol_type = other RNA
tatgcctggcaccatcaaagaaaatatcatctttggtgtctcctacg

SEQ ID NO: 2963 - RNA, 47 nt, synthetic construct
  source 1..47: mol_type = other RNA
tatgcctgggaccatcaaagaaaatatcatctttggtgtctcctatg

SEQ ID NO: 2964 - RNA, 47 nt, synthetic construct
  source 1..47: mol_type = other RNA
tatgcctgggaccattaaagagaatatcatctttggtgtttcctacg

SEQ ID NO: 2965 - RNA, 47 nt, synthetic construct
  source 1..47: mol_type = other RNA
tatgcctggcaccattaaagagaatatcatctttggtgtttcgtatg

SEQ ID NO: 2966 - RNA, 47 nt, synthetic construct
  source 1..47: mol_type = other RNA
tatgcctgggaccatcaaagaaaatatcatctttggtgtttcctacg

SEQ ID NO: 2967 - RNA, 47 nt, synthetic construct
  source 1..47: mol_type = other RNA
tatgcctggcaccatcaaagaaaatatcatctttggtgtttcgtatg

SEQ ID NO: 2968 - RNA, 47 nt, synthetic construct
  source 1..47: mol_type = other RNA
tatgccgggcaccattaaagaaaatatcatctttggtgtctcctacg

SEQ ID NO: 2969 - RNA, 47 nt, synthetic construct
  source 1..47: mol_type = other RNA
tatgccggggaccattaaagaaaatatcatctttggtgtctcctatg

SEQ ID NO: 2970 - RNA, 47 nt, synthetic construct
  source 1..47: mol_type = other RNA
tatgcctggcaccatcaaagagaatatcatctttggtgtctcctatg

SEQ ID NO: 2971 - RNA, 47 nt, synthetic construct
  source 1..47: mol_type = other RNA
tatgccggggaccattaaagaaaatatcatctttggtgtttcctacg

SEQ ID NO: 2972 - RNA, 47 nt, synthetic construct
  source 1..47: mol_type = other RNA
tatgccgggcaccattaaagaaaatatcatctttggtgtttcgtatg

SEQ ID NO: 2973 - RNA, 47 nt, synthetic construct
  source 1..47: mol_type = other RNA
tatgcctggcaccatcaaagagaatatcatctttggtgtttcctacg

SEQ ID NO: 2974 - RNA, 47 nt, synthetic construct
  source 1..47: mol_type = other RNA
tatgcctgggaccatcaaagagaatatcatctttggtgtttcctatg

SEQ ID NO: 2975 - RNA, 47 nt, synthetic construct
  source 1..47: mol_type = other RNA
tatgccgggcaccattaaagagaatatcatctttggtgtctcctatg

SEQ ID NO: 2976 - RNA, 47 nt, synthetic construct
  source 1..47: mol_type = other RNA
tatgccgggcaccatcaaagaaaatatcatctttggtgtctcctatg

SEQ ID NO: 2977 - RNA, 47 nt, synthetic construct
  source 1..47: mol_type = other RNA
tatgccgggcaccattaaagagaatatcatctttggtgtttcctacg

SEQ ID NO: 2978 - RNA, 47 nt, synthetic construct
  source 1..47: mol_type = other RNA
tatgccggggaccattaaagagaatatcatctttggtgtttcctatg

SEQ ID NO: 2979 - RNA, 47 nt, synthetic construct
  source 1..47: mol_type = other RNA
tatgccgggcaccatcaaagaaaatatcatctttggtgtttcctacg

SEQ ID NO: 2980 - RNA, 47 nt, synthetic construct
  source 1..47: mol_type = other RNA
tatgccggggaccatcaaagaaaatatcatctttggtgtttcctatg

SEQ ID NO: 2981 - RNA, 47 nt, synthetic construct
  source 1..47: mol_type = other RNA
tatgccgggcaccatcaaagagaatatcatctttggtgtttcctatg

SEQ ID NO: 2982 - RNA, 47 nt, synthetic construct
  source 1..47: mol_type = other RNA
tatgcctggcaccattaaagaaaatatcatctttggtgtctcctacg

SEQ ID NO: 2983 - RNA, 47 nt, synthetic construct
  source 1..47: mol_type = other RNA
tatgcctgggaccattaaagaaaatatcatctttggtgtctcctatg

SEQ ID NO: 2984 - RNA, 47 nt, synthetic construct
  source 1..47: mol_type = other RNA
tatgcctgggaccattaaagaaaatatcatctttggtgtttcctacg

SEQ ID NO: 2985 - RNA, 47 nt, synthetic construct
  source 1..47: mol_type = other RNA
tatgcctggcaccattaaagagaatatcatctttggtgtctcctatg

SEQ ID NO: 2986 - RNA, 47 nt, synthetic construct
  source 1..47: mol_type = other RNA
tatgcctggcaccatcaaagaaaatatcatctttggtgtctcctatg

SEQ ID NO: 2987 - RNA, 47 nt, synthetic construct
  source 1..47: mol_type = other RNA
tatgcctggcaccattaaagagaatatcatctttggtgtttcctacg

SEQ ID NO: 2988 - RNA, 47 nt, synthetic construct
  source 1..47: mol_type = other RNA
tatgcctgggaccattaaagagaatatcatctttggtgtttcctatg

SEQ ID NO: 2989 - RNA, 47 nt, synthetic construct
  source 1..47: mol_type = other RNA
tatgcctggcaccatcaaagaaaatatcatctttggtgtttcctacg

SEQ ID NO: 2990 - RNA, 47 nt, synthetic construct
  source 1..47: mol_type = other RNA
tatgcctgggaccatcaaagaaaatatcatctttggtgtttcctatg

SEQ ID NO: 2991 - RNA, 47 nt, synthetic construct
  source 1..47: mol_type = other RNA
tatgccgggcaccattaaagaaaatatcatctttggtgtctcctatg

SEQ ID NO: 2992 - RNA, 47 nt, synthetic construct
  source 1..47: mol_type = other RNA
tatgccgggcaccattaaagaaaatatcatctttggtgtttcctacg

SEQ ID NO: 2993 - RNA, 47 nt, synthetic construct
  source 1..47: mol_type = other RNA
tatgccggggaccattaaagaaaatatcatctttggtgtttcctatg

SEQ ID NO: 2994 - RNA, 47 nt, synthetic construct
  source 1..47: mol_type = other RNA
tatgcctggcaccatcaaagagaatatcatctttggtgtttcctatg

SEQ ID NO: 2995 - RNA, 47 nt, synthetic construct
  source 1..47: mol_type = other RNA
tatgccgggcaccattaaagagaatatcatctttggtgtttcctatg

SEQ ID NO: 2996 - RNA, 47 nt, synthetic construct
  source 1..47: mol_type = other RNA
tatgccgggcaccatcaaagaaaatatcatctttggtgtttcctatg

SEQ ID NO: 2997 - RNA, 183 nt, synthetic construct
  source 1..183: mol_type = other RNA
gtctgtatctatattcatcatgtttaagagcggggaaatccgcaagtttaaataaggctagtccgttatcagcgtgaaaacgcggcaccgagtcggtgctcaaggaaaacatcatcttcggtgtatcgtacgatgaatatagataccgcggttctatctagttacgcgttaaaccaactagaa

SEQ ID NO: 2998 - RNA, 183 nt, synthetic construct
  source 1..183: mol_type = other RNA
gtctgtatctatattcatcatgtttaagagcggggaaatccgcaagtttaaataaggctagtccgttatcagcgtgaaaacgcggcaccgagtcggtgctcaaggaaaacatcatcttcggtgtttcgtacgatgaatatagataccgcggttctatctagttacgcgttaaaccaactagaa

SEQ ID NO: 2999 - RNA, 183 nt, synthetic construct
  source 1..183: mol_type = other RNA
gtctgtatctatattcatcatgtttaagagcggggaaatccgcaagtttaaataaggctagtccgttatcagcgtgaaaacgcggcaccgagtcggtgcttaaggaaaacatcatcttcggtgtatcgtacgatgaatatagataccgcggttctatctagttacgcgttaaaccaactagaa

SEQ ID NO: 3000 - RNA, 183 nt, synthetic construct
  source 1..183: mol_type = other RNA
gtctgtatctatattcatcatgtttaagagcggggaaatccgcaagtttaaataaggctagtccgttatcagcgtgaaaacgcggcaccgagtcggtgctcaaggaaaacatcatctttggtgtatcgtacgatgaatatagataccgcggttctatctagttacgcgttaaaccaactagaa

SEQ ID NO: 3001 - RNA, 183 nt, synthetic construct
  source 1..183: mol_type = other RNA
gtctgtatctatattcatcatgtttaagagcggggaaatccgcaagtttaaataaggctagtccgttatcagcgtgaaaacgcggcaccgagtcggtgctcaaggaaaatatcatcttcggtgtatcgtacgatgaatatagataccgcggttctatctagttacgcgttaaaccaactagaa

SEQ ID NO: 3002 - RNA, 183 nt, synthetic construct
  source 1..183: mol_type = other RNA
gtctgtatctatattcatcatgtttaagagcggggaaatccgcaagtttaaataaggctagtccgttatcagcgtgaaaacgcggcaccgagtcggtgcttaaggaaaacatcatcttcggtgtttcgtacgatgaatatagataccgcggttctatctagttacgcgttaaaccaactagaa

SEQ ID NO: 3003 - RNA, 183 nt, synthetic construct
  source 1..183: mol_type = other RNA
gtctgtatctatattcatcatgtttaagagcggggaaatccgcaagtttaaataaggctagtccgttatcagcgtgaaaacgcggcaccgagtcggtgctcaaggaaaacatcatctttggtgtttcgtacgatgaatatagataccgcggttctatctagttacgcgttaaaccaactagaa

SEQ ID NO: 3004 - RNA, 183 nt, synthetic construct
  source 1..183: mol_type = other RNA
gtctgtatctatattcatcatgtttaagagcggggaaatccgcaagtttaaataaggctagtccgttatcagcgtgaaaacgcggcaccgagtcggtgctcaaagaaaacatcatcttcggtgtatcgtacgatgaatatagataccgcggttctatctagttacgcgttaaaccaactagaa

SEQ ID NO: 3005 - RNA, 183 nt, synthetic construct
  source 1..183: mol_type = other RNA
gtctgtatctatattcatcatgtttaagagcggggaaatccgcaagtttaaataaggctagtccgttatcagcgtgaaaacgcggcaccgagtcggtgctcaaggaaaatatcatcttcggtgtttcgtacgatgaatatagataccgcggttctatctagttacgcgttaaaccaactagaa

SEQ ID NO: 3006 - RNA, 183 nt, synthetic construct
  source 1..183: mol_type = other RNA
gtctgtatctatattcatcatgtttaagagcggggaaatccgcaagtttaaataaggctagtccgttatcagcgtgaaaacgcggcaccgagtcggtgcttaaggaaaacatcatctttggtgtatcgtacgatgaatatagataccgcggttctatctagttacgcgttaaaccaactagaa

SEQ ID NO: 3007 - RNA, 183 nt, synthetic construct
  source 1..183: mol_type = other RNA
gtctgtatctatattcatcatgtttaagagcggggaaatccgcaagtttaaataaggctagtccgttatcagcgtgaaaacgcggcaccgagtcggtgctcaaggaaaacatcatcttcggtgtatcgtatgatgaatatagataccgcggttctatctagttacgcgttaaaccaactagaa

SEQ ID NO: 3008 - RNA, 183 nt, synthetic construct
  source 1..183: mol_type = other RNA
gtctgtatctatattcatcatgtttaagagcggggaaatccgcaagtttaaataaggctagtccgttatcagcgtgaaaacgcggcaccgagtcggtgcttaaggaaaatatcatcttcggtgtatcgtacgatgaatatagataccgcggttctatctagttacgcgttaaaccaactagaa

SEQ ID NO: 3009 - RNA, 183 nt, synthetic construct
  source 1..183: mol_type = other RNA
gtctgtatctatattcatcatgtttaagagcggggaaatccgcaagtttaaataaggctagtccgttatcagcgtgaaaacgcggcaccgagtcggtgctcaaagaaaacatcatcttcggtgtttcgtacgatgaatatagataccgcggttctatctagttacgcgttaaaccaactagaa

SEQ ID NO: 3010 - RNA, 183 nt, synthetic construct
  source 1..183: mol_type = other RNA
gtctgtatctatattcatcatgtttaagagcggggaaatccgcaagtttaaataaggctagtccgttatcagcgtgaaaacgcggcaccgagtcggtgctcaaggaaaatatcatctttggtgtatcgtacgatgaatatagataccgcggttctatctagttacgcgttaaaccaactagaa

SEQ ID NO: 3011 - RNA, 183 nt, synthetic construct
  source 1..183: mol_type = other RNA
gtctgtatctatattcatcatgtttaagagcggggaaatccgcaagtttaaataaggctagtccgttatcagcgtgaaaacgcggcaccgagtcggtgcttaaggaaaacatcatctttggtgtttcgtacgatgaatatagataccgcggttctatctagttacgcgttaaaccaactagaa

SEQ ID NO: 3012 - RNA, 183 nt, synthetic construct
  source 1..183: mol_type = other RNA
gtctgtatctatattcatcatgtttaagagcggggaaatccgcaagtttaaataaggctagtccgttatcagcgtgaaaacgcggcaccgagtcggtgctcaaggaaaacatcatcttcggtgtttcgtatgatgaatatagataccgcggttctatctagttacgcgttaaaccaactagaa

SEQ ID NO: 3013 - RNA, 183 nt, synthetic construct
  source 1..183: mol_type = other RNA
gtctgtatctatattcatcatgtttaagagcggggaaatccgcaagtttaaataaggctagtccgttatcagcgtgaaaacgcggcaccgagtcggtgcttaaagaaaacatcatcttcggtgtatcgtacgatgaatatagataccgcggttctatctagttacgcgttaaaccaactagaa

SEQ ID NO: 3014 - RNA, 183 nt, synthetic construct
  source 1..183: mol_type = other RNA
gtctgtatctatattcatcatgtttaagagcggggaaatccgcaagtttaaataaggctagtccgttatcagcgtgaaaacgcggcaccgagtcggtgcttaaggaaaatatcatcttcggtgtttcgtacgatgaatatagataccgcggttctatctagttacgcgttaaaccaactagaa

SEQ ID NO: 3015 - RNA, 183 nt, synthetic construct
  source 1..183: mol_type = other RNA
gtctgtatctatattcatcatgtttaagagcggggaaatccgcaagtttaaataaggctagtccgttatcagcgtgaaaacgcggcaccgagtcggtgctcaaggaaaacatcatcttcggtgtatcctacgatgaatatagataccgcggttctatctagttacgcgttaaaccaactagaa

SEQ ID NO: 3016 - RNA, 183 nt, synthetic construct
  source 1..183: mol_type = other RNA
gtctgtatctatattcatcatgtttaagagcggggaaatccgcaagtttaaataaggctagtccgttatcagcgtgaaaacgcggcaccgagtcggtgcttaaggaaaacatcatcttcggtgtatcgtatgatgaatatagataccgcggttctatctagttacgcgttaaaccaactagaa

SEQ ID NO: 3017 - RNA, 183 nt, synthetic construct
  source 1..183: mol_type = other RNA
gtctgtatctatattcatcatgtttaagagcggggaaatccgcaagtttaaataaggctagtccgttatcagcgtgaaaacgcggcaccgagtcggtgctcaaagaaaacatcatctttggtgtatcgtacgatgaatatagataccgcggttctatctagttacgcgttaaaccaactagaa

SEQ ID NO: 3018 - RNA, 183 nt, synthetic construct
  source 1..183: mol_type = other RNA
gtctgtatctatattcatcatgtttaagagcggggaaatccgcaagtttaaataaggctagtccgttatcagcgtgaaaacgcggcaccgagtcggtgctcaaggaaaatatcatctttggtgtttcgtacgatgaatatagataccgcggttctatctagttacgcgttaaaccaactagaa

SEQ ID NO: 3019 - RNA, 183 nt, synthetic construct
  source 1..183: mol_type = other RNA
gtctgtatctatattcatcatgtttaagagcggggaaatccgcaagtttaaataaggctagtccgttatcagcgtgaaaacgcggcaccgagtcggtgctcaaagaaaatatcatcttcggtgtatcgtacgatgaatatagataccgcggttctatctagttacgcgttaaaccaactagaa

SEQ ID NO: 3020 - RNA, 183 nt, synthetic construct
  source 1..183: mol_type = other RNA
gtctgtatctatattcatcatgtttaagagcggggaaatccgcaagtttaaataaggctagtccgttatcagcgtgaaaacgcggcaccgagtcggtgcttaaagaaaacatcatcttcggtgtttcgtacgatgaatatagataccgcggttctatctagttacgcgttaaaccaactagaa

SEQ ID NO: 3021 - RNA, 183 nt, synthetic construct
  source 1..183: mol_type = other RNA
gtctgtatctatattcatcatgtttaagagcggggaaatccgcaagtttaaataaggctagtccgttatcagcgtgaaaacgcggcaccgagtcggtgctcaaggaaaacatcatctttggtgtatcgtatgatgaatatagataccgcggttctatctagttacgcgttaaaccaactagaa

SEQ ID NO: 3022 - RNA, 183 nt, synthetic construct
  source 1..183: mol_type = other RNA
gtctgtatctatattcatcatgtttaagagcggggaaatccgcaagtttaaataaggctagtccgttatcagcgtgaaaacgcggcaccgagtcggtgctcaaggaaaacatcatcttcggtgtttcctacgatgaatatagataccgcggttctatctagttacgcgttaaaccaactagaa

SEQ ID NO: 3023 - RNA, 183 nt, synthetic construct
  source 1..183: mol_type = other RNA
gtctgtatctatattcatcatgtttaagagcggggaaatccgcaagtttaaataaggctagtccgttatcagcgtgaaaacgcggcaccgagtcggtgcttaaggaaaatatcatctttggtgtatcgtacgatgaatatagataccgcggttctatctagttacgcgttaaaccaactagaa

SEQ ID NO: 3024 - RNA, 183 nt, synthetic construct
  source 1..183: mol_type = other RNA
gtctgtatctatattcatcatgtttaagagcggggaaatccgcaagtttaaataaggctagtccgttatcagcgtgaaaacgcggcaccgagtcggtgctcaaggaaaatatcatcttcggtgtatcgtatgatgaatatagataccgcggttctatctagttacgcgttaaaccaactagaa

SEQ ID NO: 3025 - RNA, 183 nt, synthetic construct
  source 1..183: mol_type = other RNA
gtctgtatctatattcatcatgtttaagagcggggaaatccgcaagtttaaataaggctagtccgttatcagcgtgaaaacgcggcaccgagtcggtgcttaaggaaaacatcatcttcggtgtttcgtatgatgaatatagataccgcggttctatctagttacgcgttaaaccaactagaa

SEQ ID NO: 3026 - RNA, 183 nt, synthetic construct
  source 1..183: mol_type = other RNA
gtctgtatctatattcatcatgtttaagagcggggaaatccgcaagtttaaataaggctagtccgttatcagcgtgaaaacgcggcaccgagtcggtgctcaaagaaaacatcatctttggtgtttcgtacgatgaatatagataccgcggttctatctagttacgcgttaaaccaactagaa

SEQ ID NO: 3027 - RNA, 183 nt, synthetic construct
  source 1..183: mol_type = other RNA
gtctgtatctatattcatcatgtttaagagcggggaaatccgcaagtttaaataaggctagtccgttatcagcgtgaaaacgcggcaccgagtcggtgcttaaggaaaacatcatcttcggtgtatcctacgatgaatatagataccgcggttctatctagttacgcgttaaaccaactagaa

SEQ ID NO: 3028 - RNA, 183 nt, synthetic construct
  source 1..183: mol_type = other RNA
gtctgtatctatattcatcatgtttaagagcggggaaatccgcaagtttaaataaggctagtccgttatcagcgtgaaaacgcggcaccgagtcggtgctcaaagaaaatatcatcttcggtgtttcgtacgatgaatatagataccgcggttctatctagttacgcgttaaaccaactagaa

SEQ ID NO: 3029 - RNA, 183 nt, synthetic construct
  source 1..183: mol_type = other RNA
gtctgtatctatattcatcatgtttaagagcggggaaatccgcaagtttaaataaggctagtccgttatcagcgtgaaaacgcggcaccgagtcggtgctcaaggaaaacatcatctttggtgtttcgtatgatgaatatagataccgcggttctatctagttacgcgttaaaccaactagaa

SEQ ID NO: 3030 - RNA, 183 nt, synthetic construct
  source 1..183: mol_type = other RNA
gtctgtatctatattcatcatgtttaagagcggggaaatccgcaagtttaaataaggctagtccgttatcagcgtgaaaacgcggcaccgagtcggtgcttaaagaaaacatcatctttggtgtatcgtacgatgaatatagataccgcggttctatctagttacgcgttaaaccaactagaa

SEQ ID NO: 3031 - RNA, 183 nt, synthetic construct
  source 1..183: mol_type = other RNA
gtctgtatctatattcatcatgtttaagagcggggaaatccgcaagtttaaataaggctagtccgttatcagcgtgaaaacgcggcaccgagtcggtgctcaaagaaaacatcatcttcggtgtatcgtatgatgaatatagataccgcggttctatctagttacgcgttaaaccaactagaa

SEQ ID NO: 3032 - RNA, 183 nt, synthetic construct
  source 1..183: mol_type = other RNA
gtctgtatctatattcatcatgtttaagagcggggaaatccgcaagtttaaataaggctagtccgttatcagcgtgaaaacgcggcaccgagtcggtgcttaaggaaaatatcatctttggtgtttcgtacgatgaatatagataccgcggttctatctagttacgcgttaaaccaactagaa

SEQ ID NO: 3033 - RNA, 183 nt, synthetic construct
  source 1..183: mol_type = other RNA
gtctgtatctatattcatcatgtttaagagcggggaaatccgcaagtttaaataaggctagtccgttatcagcgtgaaaacgcggcaccgagtcggtgctcaaggaaaacatcatctttggtgtatcctacgatgaatatagataccgcggttctatctagttacgcgttaaaccaactagaa

SEQ ID NO: 3034 - RNA, 183 nt, synthetic construct
  source 1..183: mol_type = other RNA
gtctgtatctatattcatcatgtttaagagcggggaaatccgcaagtttaaataaggctagtccgttatcagcgtgaaaacgcggcaccgagtcggtgctcaaggaaaatatcatcttcggtgtttcgtatgatgaatatagataccgcggttctatctagttacgcgttaaaccaactagaa

SEQ ID NO: 3035 - RNA, 183 nt, synthetic construct
  source 1..183: mol_type = other RNA
gtctgtatctatattcatcatgtttaagagcggggaaatccgcaagtttaaataaggctagtccgttatcagcgtgaaaacgcggcaccgagtcggtgcttaaagaaaatatcatcttcggtgtatcgtacgatgaatatagataccgcggttctatctagttacgcgttaaaccaactagaa

SEQ ID NO: 3036 - RNA, 183 nt, synthetic construct
  source 1..183: mol_type = other RNA
gtctgtatctatattcatcatgtttaagagcggggaaatccgcaagtttaaataaggctagtccgttatcagcgtgaaaacgcggcaccgagtcggtgcttaaggaaaacatcatctttggtgtatcgtatgatgaatatagataccgcggttctatctagttacgcgttaaaccaactagaa

SEQ ID NO: 3037 - RNA, 183 nt, synthetic construct
  source 1..183: mol_type = other RNA
gtctgtatctatattcatcatgtttaagagcggggaaatccgcaagtttaaataaggctagtccgttatcagcgtgaaaacgcggcaccgagtcggtgctcaaggaaaatatcatcttcggtgtatcctacgatgaatatagataccgcggttctatctagttacgcgttaaaccaactagaa

SEQ ID NO: 3038 - RNA, 183 nt, synthetic construct
  source 1..183: mol_type = other RNA
gtctgtatctatattcatcatgtttaagagcggggaaatccgcaagtttaaataaggctagtccgttatcagcgtgaaaacgcggcaccgagtcggtgcttaaggaaaacatcatcttcggtgtttcctacgatgaatatagataccgcggttctatctagttacgcgttaaaccaactagaa

SEQ ID NO: 3039 - RNA, 183 nt, synthetic construct
  source 1..183: mol_type = other RNA
gtctgtatctatattcatcatgtttaagagcggggaaatccgcaagtttaaataaggctagtccgttatcagcgtgaaaacgcggcaccgagtcggtgcttaaggaaaatatcatcttcggtgtatcgtatgatgaatatagataccgcggttctatctagttacgcgttaaaccaactagaa

SEQ ID NO: 3040 - RNA, 183 nt, synthetic construct
  source 1..183: mol_type = other RNA
gtctgtatctatattcatcatgtttaagagcggggaaatccgcaagtttaaataaggctagtccgttatcagcgtgaaaacgcggcaccgagtcggtgctcaaagaaaatatcatctttggtgtatcgtacgatgaatatagataccgcggttctatctagttacgcgttaaaccaactagaa

SEQ ID NO: 3041 - RNA, 183 nt, synthetic construct
  source 1..183: mol_type = other RNA
gtctgtatctatattcatcatgtttaagagcggggaaatccgcaagtttaaataaggctagtccgttatcagcgtgaaaacgcggcaccgagtcggtgcttaaagaaaacatcatctttggtgtttcgtacgatgaatatagataccgcggttctatctagttacgcgttaaaccaactagaa

SEQ ID NO: 3042 - RNA, 183 nt, synthetic construct
  source 1..183: mol_type = other RNA
gtctgtatctatattcatcatgtttaagagcggggaaatccgcaagtttaaataaggctagtccgttatcagcgtgaaaacgcggcaccgagtcggtgctcaaagaaaacatcatcttcggtgtttcgtatgatgaatatagataccgcggttctatctagttacgcgttaaaccaactagaa

SEQ ID NO: 3043 - RNA, 183 nt, synthetic construct
  source 1..183: mol_type = other RNA
gtctgtatctatattcatcatgtttaagagcggggaaatccgcaagtttaaataaggctagtccgttatcagcgtgaaaacgcggcaccgagtcggtgctcaaggaaaacatcatctttggtgtttcctacgatgaatatagataccgcggttctatctagttacgcgttaaaccaactagaa

SEQ ID NO: 3044 - RNA, 183 nt, synthetic construct
  source 1..183: mol_type = other RNA
gtctgtatctatattcatcatgtttaagagcggggaaatccgcaagtttaaataaggctagtccgttatcagcgtgaaaacgcggcaccgagtcggtgcttaaagaaaatatcatcttcggtgtttcgtacgatgaatatagataccgcggttctatctagttacgcgttaaaccaactagaa

SEQ ID NO: 3045 - RNA, 183 nt, synthetic construct
  source 1..183: mol_type = other RNA
gtctgtatctatattcatcatgtttaagagcggggaaatccgcaagtttaaataaggctagtccgttatcagcgtgaaaacgcggcaccgagtcggtgctcaaagaaaacatcatcttcggtgtatcctacgatgaatatagataccgcggttctatctagttacgcgttaaaccaactagaa

SEQ ID NO: 3046 - RNA, 183 nt, synthetic construct
  source 1..183: mol_type = other RNA
gtctgtatctatattcatcatgtttaagagcggggaaatccgcaagtttaaataaggctagtccgttatcagcgtgaaaacgcggcaccgagtcggtgctcaaggaaaatatcatctttggtgtatcgtatgatgaatatagataccgcggttctatctagttacgcgttaaaccaactagaa

SEQ ID NO: 3047 - RNA, 183 nt, synthetic construct
  source 1..183: mol_type = other RNA
gtctgtatctatattcatcatgtttaagagcggggaaatccgcaagtttaaataaggctagtccgttatcagcgtgaaaacgcggcaccgagtcggtgcttaaggaaaacatcatctttggtgtttcgtatgatgaatatagataccgcggttctatctagttacgcgttaaaccaactagaa

SEQ ID NO: 3048 - RNA, 183 nt, synthetic construct
  source 1..183: mol_type = other RNA
gtctgtatctatattcatcatgtttaagagcggggaaatccgcaagtttaaataaggctagtccgttatcagcgtgaaaacgcggcaccgagtcggtgcttaaagaaaacatcatcttcggtgtatcgtatgatgaatatagataccgcggttctatctagttacgcgttaaaccaactagaa

SEQ ID NO: 3049 - RNA, 183 nt, synthetic construct
  source 1..183: mol_type = other RNA
gtctgtatctatattcatcatgtttaagagcggggaaatccgcaagtttaaataaggctagtccgttatcagcgtgaaaacgcggcaccgagtcggtgctcaaggaaaatatcatcttcggtgtttcctacgatgaatatagataccgcggttctatctagttacgcgttaaaccaactagaa

SEQ ID NO: 3050 - RNA, 183 nt, synthetic construct
  source 1..183: mol_type = other RNA
gtctgtatctatattcatcatgtttaagagcggggaaatccgcaagtttaaataaggctagtccgttatcagcgtgaaaacgcggcaccgagtcggtgcttaaggaaaacatcatctttggtgtatcctacgatgaatatagataccgcggttctatctagttacgcgttaaaccaactagaa

SEQ ID NO: 3051 - RNA, 183 nt, synthetic construct
  source 1..183: mol_type = other RNA
gtctgtatctatattcatcatgtttaagagcggggaaatccgcaagtttaaataaggctagtccgttatcagcgtgaaaacgcggcaccgagtcggtgcttaaggaaaatatcatcttcggtgtttcgtatgatgaatatagataccgcggttctatctagttacgcgttaaaccaactagaa

SEQ ID NO: 3052 - RNA, 183 nt, synthetic construct
  source 1..183: mol_type = other RNA
gtctgtatctatattcatcatgtttaagagcggggaaatccgcaagtttaaataaggctagtccgttatcagcgtgaaaacgcggcaccgagtcggtgctcaaggaaaacatcatcttcggtgtatcctatgatgaatatagataccgcggttctatctagttacgcgttaaaccaactagaa

SEQ ID NO: 3053 - RNA, 183 nt, synthetic construct
  source 1..183: mol_type = other RNA
gtctgtatctatattcatcatgtttaagagcggggaaatccgcaagtttaaataaggctagtccgttatcagcgtgaaaacgcggcaccgagtcggtgctcaaagaaaatatcatctttggtgtttcgtacgatgaatatagataccgcggttctatctagttacgcgttaaaccaactagaa

SEQ ID NO: 3054 - RNA, 183 nt, synthetic construct
  source 1..183: mol_type = other RNA
gtctgtatctatattcatcatgtttaagagcggggaaatccgcaagtttaaataaggctagtccgttatcagcgtgaaaacgcggcaccgagtcggtgcttaaggaaaatatcatcttcggtgtatcctacgatgaatatagataccgcggttctatctagttacgcgttaaaccaactagaa

SEQ ID NO: 3055 - RNA, 183 nt, synthetic construct
  source 1..183: mol_type = other RNA
gtctgtatctatattcatcatgtttaagagcggggaaatccgcaagtttaaataaggctagtccgttatcagcgtgaaaacgcggcaccgagtcggtgctcaaagaaaacatcatctttggtgtatcgtatgatgaatatagataccgcggttctatctagttacgcgttaaaccaactagaa

SEQ ID NO: 3056 - RNA, 183 nt, synthetic construct
  source 1..183: mol_type = other RNA
gtctgtatctatattcatcatgtttaagagcggggaaatccgcaagtttaaataaggctagtccgttatcagcgtgaaaacgcggcaccgagtcggtgctcaaagaaaacatcatcttcggtgtttcctacgatgaatatagataccgcggttctatctagttacgcgttaaaccaactagaa

SEQ ID NO: 3057 - RNA, 183 nt, synthetic construct
  source 1..183: mol_type = other RNA
gtctgtatctatattcatcatgtttaagagcggggaaatccgcaagtttaaataaggctagtccgttatcagcgtgaaaacgcggcaccgagtcggtgctcaaggaaaatatcatctttggtgtttcgtatgatgaatatagataccgcggttctatctagttacgcgttaaaccaactagaa

SEQ ID NO: 3058 - RNA, 183 nt, synthetic construct
  source 1..183: mol_type = other RNA
gtctgtatctatattcatcatgtttaagagcggggaaatccgcaagtttaaataaggctagtccgttatcagcgtgaaaacgcggcaccgagtcggtgcttaaagaaaatatcatctttggtgtatcgtacgatgaatatagataccgcggttctatctagttacgcgttaaaccaactagaa

SEQ ID NO: 3059 - RNA, 183 nt, synthetic construct
  source 1..183: mol_type = other RNA
gtctgtatctatattcatcatgtttaagagcggggaaatccgcaagtttaaataaggctagtccgttatcagcgtgaaaacgcggcaccgagtcggtgctcaaagaaaatatcatcttcggtgtatcgtatgatgaatatagataccgcggttctatctagttacgcgttaaaccaactagaa

SEQ ID NO: 3060 - RNA, 183 nt, synthetic construct
  source 1..183: mol_type = other RNA
gtctgtatctatattcatcatgtttaagagcggggaaatccgcaagtttaaataaggctagtccgttatcagcgtgaaaacgcggcaccgagtcggtgcttaaagaaaacatcatcttcggtgtttcgtatgatgaatatagataccgcggttctatctagttacgcgttaaaccaactagaa

SEQ ID NO: 3061 - RNA, 183 nt, synthetic construct
  source 1..183: mol_type = other RNA
gtctgtatctatattcatcatgtttaagagcggggaaatccgcaagtttaaataaggctagtccgttatcagcgtgaaaacgcggcaccgagtcggtgctcaaggaaaatatcatctttggtgtatcctacgatgaatatagataccgcggttctatctagttacgcgttaaaccaactagaa

SEQ ID NO: 3062 - RNA, 183 nt, synthetic construct
  source 1..183: mol_type = other RNA
gtctgtatctatattcatcatgtttaagagcggggaaatccgcaagtttaaataaggctagtccgttatcagcgtgaaaacgcggcaccgagtcggtgcttaaggaaaacatcatctttggtgtttcctacgatgaatatagataccgcggttctatctagttacgcgttaaaccaactagaa

SEQ ID NO: 3063 - RNA, 183 nt, synthetic construct
  source 1..183: mol_type = other RNA
gtctgtatctatattcatcatgtttaagagcggggaaatccgcaagtttaaataaggctagtccgttatcagcgtgaaaacgcggcaccgagtcggtgctcaaggaaaacatcatcttcggtgtttcctatgatgaatatagataccgcggttctatctagttacgcgttaaaccaactagaa

SEQ ID NO: 3064 - RNA, 183 nt, synthetic construct
  source 1..183: mol_type = other RNA
gtctgtatctatattcatcatgtttaagagcggggaaatccgcaagtttaaataaggctagtccgttatcagcgtgaaaacgcggcaccgagtcggtgcttaaagaaaacatcatcttcggtgtatcctacgatgaatatagataccgcggttctatctagttacgcgttaaaccaactagaa

SEQ ID NO: 3065 - RNA, 183 nt, synthetic construct
  source 1..183: mol_type = other RNA
gtctgtatctatattcatcatgtttaagagcggggaaatccgcaagtttaaataaggctagtccgttatcagcgtgaaaacgcggcaccgagtcggtgcttaaggaaaatatcatctttggtgtatcgtatgatgaatatagataccgcggttctatctagttacgcgttaaaccaactagaa

SEQ ID NO: 3066 - RNA, 183 nt, synthetic construct
  source 1..183: mol_type = other RNA
gtctgtatctatattcatcatgtttaagagcggggaaatccgcaagtttaaataaggctagtccgttatcagcgtgaaaacgcggcaccgagtcggtgcttaaggaaaatatcatcttcggtgtttcctacgatgaatatagataccgcggttctatctagttacgcgttaaaccaactagaa

SEQ ID NO: 3067 - RNA, 183 nt, synthetic construct
  source 1..183: mol_type = other RNA
gtctgtatctatattcatcatgtttaagagcggggaaatccgcaagtttaaataaggctagtccgttatcagcgtgaaaacgcggcaccgagtcggtgctcaaagaaaacatcatctttggtgtttcgtatgatgaatatagataccgcggttctatctagttacgcgttaaaccaactagaa

SEQ ID NO: 3068 - RNA, 183 nt, synthetic construct
  source 1..183: mol_type = other RNA
gtctgtatctatattcatcatgtttaagagcggggaaatccgcaagtttaaataaggctagtccgttatcagcgtgaaaacgcggcaccgagtcggtgcttaaggaaaacatcatcttcggtgtatcctatgatgaatatagataccgcggttctatctagttacgcgttaaaccaactagaa

SEQ ID NO: 3069 - RNA, 183 nt, synthetic construct
  source 1..183: mol_type = other RNA
gtctgtatctatattcatcatgtttaagagcggggaaatccgcaagtttaaataaggctagtccgttatcagcgtgaaaacgcggcaccgagtcggtgcttaaagaaaatatcatctttggtgtttcgtacgatgaatatagataccgcggttctatctagttacgcgttaaaccaactagaa

SEQ ID NO: 3070 - RNA, 174 nt, synthetic construct
  source 1..174: mol_type = other RNA
gttcatcataggaaacaccaagtttaagagctagaaatagcaagtttaaataaggctagtccgttatcagcgtgaaaacgcggcaccgagtcggtgcttaaggagaacataatattcggtgtttcctatgatgtcctcgcggttctatctagttacgcgttaaaccaactagaa

SEQ ID NO: 3071 - RNA, 183 nt, synthetic construct
  source 1..183: mol_type = other RNA
gtctgtatctatattcatcatgtttaagagcggggaaatccgcaagtttaaataaggctagtccgttatcagcgtgaaaacgcggcaccgagtcggtgctcaaagaaaacatcatctttggtgtatcctacgatgaatatagataccgcggttctatctagttacgcgttaaaccaactagaa

SEQ ID NO: 3072 - RNA, 174 nt, synthetic construct
  source 1..174: mol_type = other RNA
gttcatcataggaaacaccaagtttaagagctagaaatagcaagtttaaataaggctagtccgttatcagcgtgaaaacgcggcaccgagtcggtgcttaaggagaatataatattcggtgtttcctatgatgtcttcgcggttctatctagttacgcgttaaaccaactagaa

SEQ ID NO: 3073 - RNA, 183 nt, synthetic construct
  source 1..183: mol_type = other RNA
gtctgtatctatattcatcatgtttaagagcggggaaatccgcaagtttaaataaggctagtccgttatcagcgtgaaaacgcggcaccgagtcggtgctcaaagaaaatatcatcttcggtgtttcgtatgatgaatatagataccgcggttctatctagttacgcgttaaaccaactagaa

SEQ ID NO: 3074 - RNA, 174 nt, synthetic construct
  source 1..174: mol_type = other RNA
gttcatcataggaaacaccaagtttaagagctagaaatagcaagtttaaataaggctagtccgttatcagcgtgaaaacgcggcaccgagtcggtgcttaaggaaaacataatattcggtgtttcctatgatgtcctcgcggttctatctagttacgcgttaaaccaactagaa

SEQ ID NO: 3075 - RNA, 183 nt, synthetic construct
  source 1..183: mol_type = other RNA
gtctgtatctatattcatcatgtttaagagcggggaaatccgcaagtttaaataaggctagtccgttatcagcgtgaaaacgcggcaccgagtcggtgcttaaagaaaacatcatctttggtgtatcgtatgatgaatatagataccgcggttctatctagttacgcgttaaaccaactagaa

SEQ ID NO: 3076 - RNA, 174 nt, synthetic construct
  source 1..174: mol_type = other RNA
gttcatcataggaaacaccaagtttaagagctagaaatagcaagtttaaataaggctagtccgttatcagcgtgaaaacgcggcaccgagtcggtgcttaaggaaaatataatattcggtgtttcctatgatgtcatcgcggttctatctagttacgcgttaaaccaactagaa

SEQ ID NO: 3077 - RNA, 183 nt, synthetic construct
  source 1..183: mol_type = other RNA
gtctgtatctatattcatcatgtttaagagcggggaaatccgcaagtttaaataaggctagtccgttatcagcgtgaaaacgcggcaccgagtcggtgctcaaggaaaatatcatctttggtgtttcctacgatgaatatagataccgcggttctatctagttacgcgttaaaccaactagaa

SEQ ID NO: 3078 - RNA, 174 nt, synthetic construct
  source 1..174: mol_type = other RNA
gttcatcataggaaacaccaagtttaagagctagaaatagcaagtttaaataaggctagtccgttatcagcgtgaaaacgcggcaccgagtcggtgcttaaagagaacataatattcggtgtttcctatgatgtcttcgcggttctatctagttacgcgttaaaccaactagaa

SEQ ID NO: 3079 - RNA, 183 nt, synthetic construct
  source 1..183: mol_type = other RNA
gtctgtatctatattcatcatgtttaagagcggggaaatccgcaagtttaaataaggctagtccgttatcagcgtgaaaacgcggcaccgagtcggtgctcaaagaaaatatcatcttcggtgtatcctacgatgaatatagataccgcggttctatctagttacgcgttaaaccaactagaa

SEQ ID NO: 3080 - RNA, 174 nt, synthetic construct
  source 1..174: mol_type = other RNA
gttcatcataggaaacaccaagtttaagagctagaaatagcaagtttaaataaggctagtccgttatcagcgtgaaaacgcggcaccgagtcggtgcttaaagagaatataatattcggtgtttcctatgatgtcttcgcggttctatctagttacgcgttaaaccaactagaa

SEQ ID NO: 3081 - RNA, 183 nt, synthetic construct
  source 1..183: mol_type = other RNA
gtctgtatctatattcatcatgtttaagagcggggaaatccgcaagtttaaataaggctagtccgttatcagcgtgaaaacgcggcaccgagtcggtgcttaaagaaaacatcatcttcggtgtttcctacgatgaatatagataccgcggttctatctagttacgcgttaaaccaactagaa

SEQ ID NO: 3082 - RNA, 174 nt, synthetic construct
  source 1..174: mol_type = other RNA
gttcatcataggaaacaccaagtttaagagctagaaatagcaagtttaaataaggctagtccgttatcagcgtgaaaacgcggcaccgagtcggtgcttaaggagaacataatcttcggtgtttcctatgatgtcttcgcggttctatctagttacgcgttaaaccaactagaa

SEQ ID NO: 3083 - RNA, 183 nt, synthetic construct
  source 1..183: mol_type = other RNA
gtctgtatctatattcatcatgtttaagagcggggaaatccgcaagtttaaataaggctagtccgttatcagcgtgaaaacgcggcaccgagtcggtgcttaaggaaaatatcatctttggtgtttcgtatgatgaatatagataccgcggttctatctagttacgcgttaaaccaactagaa

SEQ ID NO: 3084 - RNA, 174 nt, synthetic construct
  source 1..174: mol_type = other RNA
gttcatcataggaaacaccaagtttaagagctagaaatagcaagtttaaataaggctagtccgttatcagcgtgaaaacgcggcaccgagtcggtgcttaaggagaatataatcttcggtgtttcctatgatgtcatcgcggttctatctagttacgcgttaaaccaactagaa

SEQ ID NO: 3085 - RNA, 183 nt, synthetic construct
  source 1..183: mol_type = other RNA
gtctgtatctatattcatcatgtttaagagcggggaaatccgcaagtttaaataaggctagtccgttatcagcgtgaaaacgcggcaccgagtcggtgctcaaggaaaacatcatctttggtgtatcctatgatgaatatagataccgcggttctatctagttacgcgttaaaccaactagaa

SEQ ID NO: 3086 - RNA, 174 nt, synthetic construct
  source 1..174: mol_type = other RNA
gttcatcataggaaacaccaagtttaagagctagaaatagcaagtttaaataaggctagtccgttatcagcgtgaaaacgcggcaccgagtcggtgcttaaagaaaacataatattcggtgtttcctatgatgtcatcgcggttctatctagttacgcgttaaaccaactagaa

SEQ ID NO: 3087 - RNA, 183 nt, synthetic construct
  source 1..183: mol_type = other RNA
gtctgtatctatattcatcatgtttaagagcggggaaatccgcaagtttaaataaggctagtccgttatcagcgtgaaaacgcggcaccgagtcggtgcttaaagaaaatatcatcttcggtgtatcgtatgatgaatatagataccgcggttctatctagttacgcgttaaaccaactagaa

SEQ ID NO: 3088 - RNA, 174 nt, synthetic construct
  source 1..174: mol_type = other RNA
gttcatcataggaaacaccaagtttaagagctagaaatagcaagtttaaataaggctagtccgttatcagcgtgaaaacgcggcaccgagtcggtgcttaaagaaaatataatattcggtgtttcctatgatgtcttcgcggttctatctagttacgcgttaaaccaactagaa

SEQ ID NO: 3089 - RNA, 183 nt, synthetic construct
  source 1..183: mol_type = other RNA
gtctgtatctatattcatcatgtttaagagcggggaaatccgcaagtttaaataaggctagtccgttatcagcgtgaaaacgcggcaccgagtcggtgcttaaggaaaatatcatctttggtgtatcctacgatgaatatagataccgcggttctatctagttacgcgttaaaccaactagaa

SEQ ID NO: 3090 - RNA, 174 nt, synthetic construct
  source 1..174: mol_type = other RNA
gttcatcataggaaacaccaagtttaagagctagaaatagcaagtttaaataaggctagtccgttatcagcgtgaaaacgcggcaccgagtcggtgcttaaggaaaacataatcttcggtgtttcctatgatgtcatcgcggttctatctagttacgcgttaaaccaactagaa

SEQ ID NO: 3091 - RNA, 183 nt, synthetic construct
  source 1..183: mol_type = other RNA
gtctgtatctatattcatcatgtttaagagcggggaaatccgcaagtttaaataaggctagtccgttatcagcgtgaaaacgcggcaccgagtcggtgctcaaggaaaatatcatcttcggtgtatcctatgatgaatatagataccgcggttctatctagttacgcgttaaaccaactagaa

SEQ ID NO: 3092 - RNA, 174 nt, synthetic construct
  source 1..174: mol_type = other RNA
gttcatcataggaaacaccaagtttaagagctagaaatagcaagtttaaataaggctagtccgttatcagcgtgaaaacgcggcaccgagtcggtgcttaaggaaaatataatcttcggtgtttcctatgatgtcatcgcggttctatctagttacgcgttaaaccaactagaa

SEQ ID NO: 3093 - RNA, 183 nt, synthetic construct
  source 1..183: mol_type = other RNA
gtctgtatctatattcatcatgtttaagagcggggaaatccgcaagtttaaataaggctagtccgttatcagcgtgaaaacgcggcaccgagtcggtgcttaaggaaaacatcatcttcggtgtttcctatgatgaatatagataccgcggttctatctagttacgcgttaaaccaactagaa

SEQ ID NO: 3094 - RNA, 174 nt, synthetic construct
  source 1..174: mol_type = other RNA
gttcatcataggaaacaccaagtttaagagctagaaatagcaagtttaaataaggctagtccgttatcagcgtgaaaacgcggcaccgagtcggtgcttaaagagaacataatcttcggtgtttcctatgatgtcttcgcggttctatctagttacgcgttaaaccaactagaa

SEQ ID NO: 3095 - RNA, 183 nt, synthetic construct
  source 1..183: mol_type = other RNA
gtctgtatctatattcatcatgtttaagagcggggaaatccgcaagtttaaataaggctagtccgttatcagcgtgaaaacgcggcaccgagtcggtgctcaaagaaaacatcatctttggtgtttcctacgatgaatatagataccgcggttctatctagttacgcgttaaaccaactagaa

SEQ ID NO: 3096 - RNA, 174 nt, synthetic construct
  source 1..174: mol_type = other RNA
gttcatcataggaaacaccaagtttaagagctagaaatagcaagtttaaataaggctagtccgttatcagcgtgaaaacgcggcaccgagtcggtgcttaaagagaatataatcttcggtgtttcctatgatgtccccgcggttctatctagttacgcgttaaaccaactagaa

SEQ ID NO: 3097 - RNA, 183 nt, synthetic construct
  source 1..183: mol_type = other RNA
gtctgtatctatattcatcatgtttaagagcggggaaatccgcaagtttaaataaggctagtccgttatcagcgtgaaaacgcggcaccgagtcggtgctcaaagaaaatatcatctttggtgtatcgtatgatgaatatagataccgcggttctatctagttacgcgttaaaccaactagaa

SEQ ID NO: 3098 - RNA, 174 nt, synthetic construct
  source 1..174: mol_type = other RNA
gttcatcataggaaacaccaagtttaagagctagaaatagcaagtttaaataaggctagtccgttatcagcgtgaaaacgcggcaccgagtcggtgcttaaagaaaacataatcttcggtgtttcctatgatgtcttcgcggttctatctagttacgcgttaaaccaactagaa

SEQ ID NO: 3099 - RNA, 183 nt, synthetic construct
  source 1..183: mol_type = other RNA
gtctgtatctatattcatcatgtttaagagcggggaaatccgcaagtttaaataaggctagtccgttatcagcgtgaaaacgcggcaccgagtcggtgcttaaagaaaacatcatctttggtgtttcgtatgatgaatatagataccgcggttctatctagttacgcgttaaaccaactagaa

SEQ ID NO: 3100 - RNA, 174 nt, synthetic construct
  source 1..174: mol_type = other RNA
gttcatcataggaaacaccaagtttaagagctagaaatagcaagtttaaataaggctagtccgttatcagcgtgaaaacgcggcaccgagtcggtgcttaaagaaaatataatcttcggtgtttcctatgatgtcttcgcggttctatctagttacgcgttaaaccaactagaa

SEQ ID NO: 3101 - RNA, 183 nt, synthetic construct
  source 1..183: mol_type = other RNA
gtctgtatctatattcatcatgtttaagagcggggaaatccgcaagtttaaataaggctagtccgttatcagcgtgaaaacgcggcaccgagtcggtgctcaaagaaaatatcatcttcggtgtttcctacgatgaatatagataccgcggttctatctagttacgcgttaaaccaactagaa

SEQ ID NO: 3102 - RNA, 174 nt, synthetic construct
  source 1..174: mol_type = other RNA
gttcatcataggaaacaccaagtttaagagctagaaatagcaagtttaaataaggctagtccgttatcagcgtgaaaacgcggcaccgagtcggtgcttaaggagaacataatatttggtgtttcctatgatgtcttcgcggttctatctagttacgcgttaaaccaactagaa

SEQ ID NO: 3103 - RNA, 183 nt, synthetic construct
  source 1..183: mol_type = other RNA
gtctgtatctatattcatcatgtttaagagcggggaaatccgcaagtttaaataaggctagtccgttatcagcgtgaaaacgcggcaccgagtcggtgctcaaggaaaacatcatctttggtgtttcctatgatgaatatagataccgcggttctatctagttacgcgttaaaccaactagaa

SEQ ID NO: 3104 - RNA, 174 nt, synthetic construct
  source 1..174: mol_type = other RNA
gttcatcataggaaacaccaagtttaagagctagaaatagcaagtttaaataaggctagtccgttatcagcgtgaaaacgcggcaccgagtcggtgcttaaggagaatataatatttggtgtttcctatgatgtcctcgcggttctatctagttacgcgttaaaccaactagaa

SEQ ID NO: 3105 - RNA, 183 nt, synthetic construct
  source 1..183: mol_type = other RNA
gtctgtatctatattcatcatgtttaagagcggggaaatccgcaagtttaaataaggctagtccgttatcagcgtgaaaacgcggcaccgagtcggtgcttaaagaaaacatcatctttggtgtatcctacgatgaatatagataccgcggttctatctagttacgcgttaaaccaactagaa

SEQ ID NO: 3106 - RNA, 174 nt, synthetic construct
  source 1..174: mol_type = other RNA
gttcatcataggaaacaccaagtttaagagctagaaatagcaagtttaaataaggctagtccgttatcagcgtgaaaacgcggcaccgagtcggtgcttaaggagaacatcatattcggtgtttcctatgatgctttcgcggttctatctagttacgcgttaaaccaactagaa

SEQ ID NO: 3107 - RNA, 183 nt, synthetic construct
  source 1..183: mol_type = other RNA
gtctgtatctatattcatcatgtttaagagcggggaaatccgcaagtttaaataaggctagtccgttatcagcgtgaaaacgcggcaccgagtcggtgcttaaagaaaatatcatcttcggtgtttcgtatgatgaatatagataccgcggttctatctagttacgcgttaaaccaactagaa

SEQ ID NO: 3108 - RNA, 174 nt, synthetic construct
  source 1..174: mol_type = other RNA
gttcatcataggaaacaccaagtttaagagctagaaatagcaagtttaaataaggctagtccgttatcagcgtgaaaacgcggcaccgagtcggtgcttaaggagaatatcatattcggtgtttcctatgatgtcaccgcggttctatctagttacgcgttaaaccaactagaa

SEQ ID NO: 3109 - RNA, 183 nt, synthetic construct
  source 1..183: mol_type = other RNA
gtctgtatctatattcatcatgtttaagagcggggaaatccgcaagtttaaataaggctagtccgttatcagcgtgaaaacgcggcaccgagtcggtgctcaaagaaaacatcatcttcggtgtatcctatgatgaatatagataccgcggttctatctagttacgcgttaaaccaactagaa

SEQ ID NO: 3110 - RNA, 174 nt, synthetic construct
  source 1..174: mol_type = other RNA
gttcatcataggaaacaccaagtttaagagctagaaatagcaagtttaaataaggctagtccgttatcagcgtgaaaacgcggcaccgagtcggtgcttaaggaaaacataatatttggtgtttcctatgatgtcctcgcggttctatctagttacgcgttaaaccaactagaa

SEQ ID NO: 3111 - RNA, 183 nt, synthetic construct
  source 1..183: mol_type = other RNA
gtctgtatctatattcatcatgtttaagagcggggaaatccgcaagtttaaataaggctagtccgttatcagcgtgaaaacgcggcaccgagtcggtgcttaaggaaaatatcatctttggtgtttcctacgatgaatatagataccgcggttctatctagttacgcgttaaaccaactagaa

SEQ ID NO: 3112 - RNA, 174 nt, synthetic construct
  source 1..174: mol_type = other RNA
gttcatcataggaaacaccaagtttaagagctagaaatagcaagtttaaataaggctagtccgttatcagcgtgaaaacgcggcaccgagtcggtgcttaaggaaaatataatatttggtgtttcctatgatgtcctcgcggttctatctagttacgcgttaaaccaactagaa

SEQ ID NO: 3113 - RNA, 183 nt, synthetic construct
  source 1..183: mol_type = other RNA
gtctgtatctatattcatcatgtttaagagcggggaaatccgcaagtttaaataaggctagtccgttatcagcgtgaaaacgcggcaccgagtcggtgctcaaggaaaatatcatcttcggtgtttcctatgatgaatatagataccgcggttctatctagttacgcgttaaaccaactagaa

SEQ ID NO: 3114 - RNA, 174 nt, synthetic construct
  source 1..174: mol_type = other RNA
gttcatcataggaaacaccaagtttaagagctagaaatagcaagtttaaataaggctagtccgttatcagcgtgaaaacgcggcaccgagtcggtgcttaaggaaaacatcatattcggtgtttcctatgatgtcatcgcggttctatctagttacgcgttaaaccaactagaa

SEQ ID NO: 3115 - RNA, 183 nt, synthetic construct
  source 1..183: mol_type = other RNA
gtctgtatctatattcatcatgtttaagagcggggaaatccgcaagtttaaataaggctagtccgttatcagcgtgaaaacgcggcaccgagtcggtgcttaaagaaaatatcatcttcggtgtatcctacgatgaatatagataccgcggttctatctagttacgcgttaaaccaactagaa

SEQ ID NO: 3116 - RNA, 174 nt, synthetic construct
  source 1..174: mol_type = other RNA
gttcatcataggaaacaccaagtttaagagctagaaatagcaagtttaaataaggctagtccgttatcagcgtgaaaacgcggcaccgagtcggtgcttaaggaaaatatcatattcggtgtttcctatgatgtcatcgcggttctatctagttacgcgttaaaccaactagaa

SEQ ID NO: 3117 - RNA, 183 nt, synthetic construct
  source 1..183: mol_type = other RNA
gtctgtatctatattcatcatgtttaagagcggggaaatccgcaagtttaaataaggctagtccgttatcagcgtgaaaacgcggcaccgagtcggtgcttaaggaaaacatcatctttggtgtatcctatgatgaatatagataccgcggttctatctagttacgcgttaaaccaactagaa

SEQ ID NO: 3118 - RNA, 174 nt, synthetic construct
  source 1..174: mol_type = other RNA
gttcatcataggaaacaccaagtttaagagctagaaatagcaagtttaaataaggctagtccgttatcagcgtgaaaacgcggcaccgagtcggtgcttaaagagaacataatatttggtgtttcctatgatgtcttcgcggttctatctagttacgcgttaaaccaactagaa

SEQ ID NO: 3119 - RNA, 183 nt, synthetic construct
  source 1..183: mol_type = other RNA
gtctgtatctatattcatcatgtttaagagcggggaaatccgcaagtttaaataaggctagtccgttatcagcgtgaaaacgcggcaccgagtcggtgctcaaagaaaatatcatctttggtgtttcgtatgatgaatatagataccgcggttctatctagttacgcgttaaaccaactagaa

SEQ ID NO: 3120 - RNA, 174 nt, synthetic construct
  source 1..174: mol_type = other RNA
gttcatcataggaaacaccaagtttaagagctagaaatagcaagtttaaataaggctagtccgttatcagcgtgaaaacgcggcaccgagtcggtgcttaaagagaatataatatttggtgtttcctatgatgtccccgcggttctatctagttacgcgttaaaccaactagaa

SEQ ID NO: 3121 - RNA, 183 nt, synthetic construct
  source 1..183: mol_type = other RNA
gtctgtatctatattcatcatgtttaagagcggggaaatccgcaagtttaaataaggctagtccgttatcagcgtgaaaacgcggcaccgagtcggtgcttaaggaaaatatcatcttcggtgtatcctatgatgaatatagataccgcggttctatctagttacgcgttaaaccaactagaa

SEQ ID NO: 3122 - RNA, 174 nt, synthetic construct
  source 1..174: mol_type = other RNA
gttcatcataggaaacaccaagtttaagagctagaaatagcaagtttaaataaggctagtccgttatcagcgtgaaaacgcggcaccgagtcggtgcttaaagagaacatcatattcggtgtttcctatgatgctatcgcggttctatctagttacgcgttaaaccaactagaa

SEQ ID NO: 3123 - RNA, 183 nt, synthetic construct
  source 1..183: mol_type = other RNA
gtctgtatctatattcatcatgtttaagagcggggaaatccgcaagtttaaataaggctagtccgttatcagcgtgaaaacgcggcaccgagtcggtgctcaaagaaaatatcatctttggtgtatcctacgatgaatatagataccgcggttctatctagttacgcgttaaaccaactagaa

SEQ ID NO: 3124 - RNA, 174 nt, synthetic construct
  source 1..174: mol_type = other RNA
gttcatcataggaaacaccaagtttaagagctagaaatagcaagtttaaataaggctagtccgttatcagcgtgaaaacgcggcaccgagtcggtgcttaaggagaacataatctttggtgtttcctatgatgtcctcgcggttctatctagttacgcgttaaaccaactagaa

SEQ ID NO: 3125 - RNA, 183 nt, synthetic construct
  source 1..183: mol_type = other RNA
gtctgtatctatattcatcatgtttaagagcggggaaatccgcaagtttaaataaggctagtccgttatcagcgtgaaaacgcggcaccgagtcggtgcttaaagaaaacatcatctttggtgtttcctacgatgaatatagataccgcggttctatctagttacgcgttaaaccaactagaa

SEQ ID NO: 3126 - RNA, 174 nt, synthetic construct
  source 1..174: mol_type = other RNA
gttcatcataggaaacaccaagtttaagagctagaaatagcaagtttaaataaggctagtccgttatcagcgtgaaaacgcggcaccgagtcggtgcttaaagagaatatcatattcggtgtttcctatgatgctatcgcggttctatctagttacgcgttaaaccaactagaa

SEQ ID NO: 3127 - RNA, 183 nt, synthetic construct
  source 1..183: mol_type = other RNA
gtctgtatctatattcatcatgtttaagagcggggaaatccgcaagtttaaataaggctagtccgttatcagcgtgaaaacgcggcaccgagtcggtgctcaaagaaaacatcatcttcggtgtttcctatgatgaatatagataccgcggttctatctagttacgcgttaaaccaactagaa

SEQ ID NO: 3128 - RNA, 174 nt, synthetic construct
  source 1..174: mol_type = other RNA
gttcatcataggaaacaccaagtttaagagctagaaatagcaagtttaaataaggctagtccgttatcagcgtgaaaacgcggcaccgagtcggtgcttaaggagaatataatctttggtgtttcctatgatgtcttcgcggttctatctagttacgcgttaaaccaactagaa

SEQ ID NO: 3129 - RNA, 183 nt, synthetic construct
  source 1..183: mol_type = other RNA
gtctgtatctatattcatcatgtttaagagcggggaaatccgcaagtttaaataaggctagtccgttatcagcgtgaaaacgcggcaccgagtcggtgcttaaagaaaatatcatctttggtgtatcgtatgatgaatatagataccgcggttctatctagttacgcgttaaaccaactagaa

SEQ ID NO: 3130 - RNA, 174 nt, synthetic construct
  source 1..174: mol_type = other RNA
gttcatcataggaaacaccaagtttaagagctagaaatagcaagtttaaataaggctagtccgttatcagcgtgaaaacgcggcaccgagtcggtgcttaaggagaacatcatcttcggtgtttcctatgatgtcatcgcggttctatctagttacgcgttaaaccaactagaa

SEQ ID NO: 3131 - RNA, 183 nt, synthetic construct
  source 1..183: mol_type = other RNA
gtctgtatctatattcatcatgtttaagagcggggaaatccgcaagtttaaataaggctagtccgttatcagcgtgaaaacgcggcaccgagtcggtgcttaaagaaaatatcatcttcggtgtttcctacgatgaatatagataccgcggttctatctagttacgcgttaaaccaactagaa

SEQ ID NO: 3132 - RNA, 174 nt, synthetic construct
  source 1..174: mol_type = other RNA
gttcatcataggaaacaccaagtttaagagctagaaatagcaagtttaaataaggctagtccgttatcagcgtgaaaacgcggcaccgagtcggtgcttaaggagaatatcatcttcggtgtttcctatgatgtcatcgcggttctatctagttacgcgttaaaccaactagaa

SEQ ID NO: 3133 - RNA, 183 nt, synthetic construct
  source 1..183: mol_type = other RNA
gtctgtatctatattcatcatgtttaagagcggggaaatccgcaagtttaaataaggctagtccgttatcagcgtgaaaacgcggcaccgagtcggtgctcaaggaaaatatcatctttggtgtatcctatgatgaatatagataccgcggttctatctagttacgcgttaaaccaactagaa

SEQ ID NO: 3134 - RNA, 174 nt, synthetic construct
  source 1..174: mol_type = other RNA
gttcatcataggaaacaccaagtttaagagctagaaatagcaagtttaaataaggctagtccgttatcagcgtgaaaacgcggcaccgagtcggtgcttaaagaaaacataatatttggtgtttcctatgatgtcctcgcggttctatctagttacgcgttaaaccaactagaa

SEQ ID NO: 3135 - RNA, 183 nt, synthetic construct
  source 1..183: mol_type = other RNA
gtctgtatctatattcatcatgtttaagagcggggaaatccgcaagtttaaataaggctagtccgttatcagcgtgaaaacgcggcaccgagtcggtgcttaaggaaaacatcatctttggtgtttcctatgatgaatatagataccgcggttctatctagttacgcgttaaaccaactagaa

SEQ ID NO: 3136 - RNA, 174 nt, synthetic construct
  source 1..174: mol_type = other RNA
gttcatcataggaaacaccaagtttaagagctagaaatagcaagtttaaataaggctagtccgttatcagcgtgaaaacgcggcaccgagtcggtgcttaaagaaaatataatatttggtgtttcctatgatgtccccgcggttctatctagttacgcgttaaaccaactagaa

SEQ ID NO: 3137 - RNA, 183 nt, synthetic construct
  source 1..183: mol_type = other RNA
gtctgtatctatattcatcatgtttaagagcggggaaatccgcaagtttaaataaggctagtccgttatcagcgtgaaaacgcggcaccgagtcggtgcttaaagaaaacatcatcttcggtgtatcctatgatgaatatagataccgcggttctatctagttacgcgttaaaccaactagaa

SEQ ID NO: 3138 - RNA, 174 nt, synthetic construct
  source 1..174: mol_type = other RNA
gttcatcataggaaacaccaagtttaagagctagaaatagcaagtttaaataaggctagtccgttatcagcgtgaaaacgcggcaccgagtcggtgcttaaagaaaacatcatattcggtgtttcctatgatgctaccgcggttctatctagttacgcgttaaaccaactagaa

SEQ ID NO: 3139 - RNA, 183 nt, synthetic construct
  source 1..183: mol_type = other RNA
gtctgtatctatattcatcatgtttaagagcggggaaatccgcaagtttaaataaggctagtccgttatcagcgtgaaaacgcggcaccgagtcggtgcttaaggaaaatatcatcttcggtgtttcctatgatgaatatagataccgcggttctatctagttacgcgttaaaccaactagaa

SEQ ID NO: 3140 - RNA, 174 nt, synthetic construct
  source 1..174: mol_type = other RNA
gttcatcataggaaacaccaagtttaagagctagaaatagcaagtttaaataaggctagtccgttatcagcgtgaaaacgcggcaccgagtcggtgcttaaggaaaacataatctttggtgtttcctatgatgtcttcgcggttctatctagttacgcgttaaaccaactagaa

SEQ ID NO: 3141 - RNA, 183 nt, synthetic construct
  source 1..183: mol_type = other RNA
gtctgtatctatattcatcatgtttaagagcggggaaatccgcaagtttaaataaggctagtccgttatcagcgtgaaaacgcggcaccgagtcggtgctcaaagaaaatatcatctttggtgtttcctacgatgaatatagataccgcggttctatctagttacgcgttaaaccaactagaa

SEQ ID NO: 3142 - RNA, 174 nt, synthetic construct
  source 1..174: mol_type = other RNA
gttcatcataggaaacaccaagtttaagagctagaaatagcaagtttaaataaggctagtccgttatcagcgtgaaaacgcggcaccgagtcggtgcttaaagaaaatatcatattcggtgtttcctatgatgctcccgcggttctatctagttacgcgttaaaccaactagaa

SEQ ID NO: 3143 - RNA, 183 nt, synthetic construct
  source 1..183: mol_type = other RNA
gtctgtatctatattcatcatgtttaagagcggggaaatccgcaagtttaaataaggctagtccgttatcagcgtgaaaacgcggcaccgagtcggtgctcaaagaaaacatcatctttggtgtatcctatgatgaatatagataccgcggttctatctagttacgcgttaaaccaactagaa

SEQ ID NO: 3144 - RNA, 174 nt, synthetic construct
  source 1..174: mol_type = other RNA
gttcatcataggaaacaccaagtttaagagctagaaatagcaagtttaaataaggctagtccgttatcagcgtgaaaacgcggcaccgagtcggtgcttaaggaaaatataatctttggtgtttcctatgatgtcttcgcggttctatctagttacgcgttaaaccaactagaa

SEQ ID NO: 3145 - RNA, 183 nt, synthetic construct
  source 1..183: mol_type = other RNA
gtctgtatctatattcatcatgtttaagagcggggaaatccgcaagtttaaataaggctagtccgttatcagcgtgaaaacgcggcaccgagtcggtgctcaaggaaaatatcatctttggtgtttcctatgatgaatatagataccgcggttctatctagttacgcgttaaaccaactagaa

SEQ ID NO: 3146 - RNA, 174 nt, synthetic construct
  source 1..174: mol_type = other RNA
gttcatcataggaaacaccaagtttaagagctagaaatagcaagtttaaataaggctagtccgttatcagcgtgaaaacgcggcaccgagtcggtgcttaaggaaaacatcatcttcggtgtttcctatgatgtcctcgcggttctatctagttacgcgttaaaccaactagaa

SEQ ID NO: 3147 - RNA, 183 nt, synthetic construct
  source 1..183: mol_type = other RNA
gtctgtatctatattcatcatgtttaagagcggggaaatccgcaagtttaaataaggctagtccgttatcagcgtgaaaacgcggcaccgagtcggtgcttaaagaaaatatcatctttggtgtatcctacgatgaatatagataccgcggttctatctagttacgcgttaaaccaactagaa

SEQ ID NO: 3148 - RNA, 174 nt, synthetic construct
  source 1..174: mol_type = other RNA
gttcatcataggaaacaccaagtttaagagctagaaatagcaagtttaaataaggctagtccgttatcagcgtgaaaacgcggcaccgagtcggtgcttaaggaaaatatcatcttcggtgtttcctatgatgtcctcgcggttctatctagttacgcgttaaaccaactagaa

SEQ ID NO: 3149 - RNA, 183 nt, synthetic construct
  source 1..183: mol_type = other RNA
gtctgtatctatattcatcatgtttaagagcggggaaatccgcaagtttaaataaggctagtccgttatcagcgtgaaaacgcggcaccgagtcggtgctcaaagaaaatatcatcttcggtgtatcctatgatgaatatagataccgcggttctatctagttacgcgttaaaccaactagaa

SEQ ID NO: 3150 - RNA, 174 nt, synthetic construct
  source 1..174: mol_type = other RNA
gttcatcataggaaacaccaagtttaagagctagaaatagcaagtttaaataaggctagtccgttatcagcgtgaaaacgcggcaccgagtcggtgcttaaagagaacataatctttggtgtttcctatgatgtcatcgcggttctatctagttacgcgttaaaccaactagaa

SEQ ID NO: 3151 - RNA, 183 nt, synthetic construct
  source 1..183: mol_type = other RNA
gtctgtatctatattcatcatgtttaagagcggggaaatccgcaagtttaaataaggctagtccgttatcagcgtgaaaacgcggcaccgagtcggtgcttaaagaaaacatcatcttcggtgtttcctatgatgaatatagataccgcggttctatctagttacgcgttaaaccaactagaa

SEQ ID NO: 3152 - RNA, 174 nt, synthetic construct
  source 1..174: mol_type = other RNA
gttcatcataggaaacaccaagtttaagagctagaaatagcaagtttaaataaggctagtccgttatcagcgtgaaaacgcggcaccgagtcggtgcttaaagagaatataatctttggtgtttcctatgatgtcttcgcggttctatctagttacgcgttaaaccaactagaa

SEQ ID NO: 3153 - RNA, 183 nt, synthetic construct
  source 1..183: mol_type = other RNA
gtctgtatctatattcatcatgtttaagagcggggaaatccgcaagtttaaataaggctagtccgttatcagcgtgaaaacgcggcaccgagtcggtgcttaaggaaaatatcatctttggtgtatcctatgatgaatatagataccgcggttctatctagttacgcgttaaaccaactagaa

SEQ ID NO: 3154 - RNA, 174 nt, synthetic construct
  source 1..174: mol_type = other RNA
gttcatcataggaaacaccaagtttaagagctagaaatagcaagtttaaataaggctagtccgttatcagcgtgaaaacgcggcaccgagtcggtgcttaaagagaacatcatcttcggtgtttcctatgatgcttccgcggttctatctagttacgcgttaaaccaactagaa

SEQ ID NO: 3155 - RNA, 183 nt, synthetic construct
  source 1..183: mol_type = other RNA
gtctgtatctatattcatcatgtttaagagcggggaaatccgcaagtttaaataaggctagtccgttatcagcgtgaaaacgcggcaccgagtcggtgctcaaagaaaacatcatctttggtgtttcctatgatgaatatagataccgcggttctatctagttacgcgttaaaccaactagaa

SEQ ID NO: 3156 - RNA, 174 nt, synthetic construct
  source 1..174: mol_type = other RNA
gttcatcataggaaacaccaagtttaagagctagaaatagcaagtttaaataaggctagtccgttatcagcgtgaaaacgcggcaccgagtcggtgcttaaagagaatatcatcttcggtgtttcctatgatgctatcgcggttctatctagttacgcgttaaaccaactagaa

SEQ ID NO: 3157 - RNA, 183 nt, synthetic construct
  source 1..183: mol_type = other RNA
gtctgtatctatattcatcatgtttaagagcggggaaatccgcaagtttaaataaggctagtccgttatcagcgtgaaaacgcggcaccgagtcggtgctcaaagaaaatatcatcttcggtgtttcctatgatgaatatagataccgcggttctatctagttacgcgttaaaccaactagaa

SEQ ID NO: 3158 - RNA, 174 nt, synthetic construct
  source 1..174: mol_type = other RNA
gttcatcataggaaacaccaagtttaagagctagaaatagcaagtttaaataaggctagtccgttatcagcgtgaaaacgcggcaccgagtcggtgcttaaagaaaacataatctttggtgtttcctatgatgtcatcgcggttctatctagttacgcgttaaaccaactagaa

SEQ ID NO: 3159 - RNA, 183 nt, synthetic construct
  source 1..183: mol_type = other RNA
gtctgtatctatattcatcatgtttaagagcggggaaatccgcaagtttaaataaggctagtccgttatcagcgtgaaaacgcggcaccgagtcggtgcttaaagaaaacatcatctttggtgtatcctatgatgaatatagataccgcggttctatctagttacgcgttaaaccaactagaa

SEQ ID NO: 3160 - RNA, 174 nt, synthetic construct
  source 1..174: mol_type = other RNA
gttcatcataggaaacaccaagtttaagagctagaaatagcaagtttaaataaggctagtccgttatcagcgtgaaaacgcggcaccgagtcggtgcttaaagaaaatataatctttggtgtttcctatgatgtctccgcggttctatctagttacgcgttaaaccaactagaa

SEQ ID NO: 3161 - RNA, 183 nt, synthetic construct
  source 1..183: mol_type = other RNA
gtctgtatctatattcatcatgtttaagagcggggaaatccgcaagtttaaataaggctagtccgttatcagcgtgaaaacgcggcaccgagtcggtgcttaaagaaaatatcatcttcggtgtatcctatgatgaatatagataccgcggttctatctagttacgcgttaaaccaactagaa

SEQ ID NO: 3162 - RNA, 174 nt, synthetic construct
  source 1..174: mol_type = other RNA
gttcatcataggaaacaccaagtttaagagctagaaatagcaagtttaaataaggctagtccgttatcagcgtgaaaacgcggcaccgagtcggtgcttaaagaaaacatcatcttcggtgtttcctatgatgtcaccgcggttctatctagttacgcgttaaaccaactagaa

SEQ ID NO: 3163 - RNA, 183 nt, synthetic construct
  source 1..183: mol_type = other RNA
gtctgtatctatattcatcatgtttaagagcggggaaatccgcaagtttaaataaggctagtccgttatcagcgtgaaaacgcggcaccgagtcggtgctcaaagaaaatatcatctttggtgtatcctatgatgaatatagataccgcggttctatctagttacgcgttaaaccaactagaa

SEQ ID NO: 3164 - RNA, 174 nt, synthetic construct
  source 1..174: mol_type = other RNA
gttcatcataggaaacaccaagtttaagagctagaaatagcaagtttaaataaggctagtccgttatcagcgtgaaaacgcggcaccgagtcggtgcttaaagaaaatatcatcttcggtgtttcctatgatgtccccgcggttctatctagttacgcgttaaaccaactagaa

SEQ ID NO: 3165 - RNA, 197 nt, synthetic construct
  source 1..197: mol_type = other RNA
gtctgtatctatattcatcatgtttaagagcggggaaatccgcaagtttaaataaggctagtccgttatcagcgtgaaaacgcggcaccgagtcggtgctatgccggggaccatcaaagagaatatcatctttggtgtctcgtacgatgaatatagataccgcggttctatctagttacgcgttaaaccaactagaa

SEQ ID NO: 3166 - RNA, 174 nt, synthetic construct
  source 1..174: mol_type = other RNA
gttcatcataggaaacaccaagtttaagagctagaaatagcaagtttaaataaggctagtccgttatcagcgtgaaaacgcggcaccgagtcggtgcttaaggagaacatcatatttggtgtttcctatgatgtcatcgcggttctatctagttacgcgttaaaccaactagaa

SEQ ID NO: 3167 - RNA, 197 nt, synthetic construct
  source 1..197: mol_type = other RNA
gtctgtatctatattcatcatgtttaagagcggggaaatccgcaagtttaaataaggctagtccgttatcagcgtgaaaacgcggcaccgagtcggtgctatgcctgggaccatcaaagagaatatcatctttggtgtctcgtacgatgaatatagataccgcggttctatctagttacgcgttaaaccaactagaa

SEQ ID NO: 3168 - RNA, 174 nt, synthetic construct
  source 1..174: mol_type = other RNA
gttcatcataggaaacaccaagtttaagagctagaaatagcaagtttaaataaggctagtccgttatcagcgtgaaaacgcggcaccgagtcggtgcttaaggagaatatcatatttggtgtttcctatgatgtcatcgcggttctatctagttacgcgttaaaccaactagaa

SEQ ID NO: 3169 - RNA, 197 nt, synthetic construct
  source 1..197: mol_type = other RNA
gtctgtatctatattcatcatgtttaagagcggggaaatccgcaagtttaaataaggctagtccgttatcagcgtgaaaacgcggcaccgagtcggtgctatgccggggaccattaaagagaatatcatctttggtgtctcgtacgatgaatatagataccgcggttctatctagttacgcgttaaaccaactagaa

SEQ ID NO: 3170 - RNA, 174 nt, synthetic construct
  source 1..174: mol_type = other RNA
gttcatcataggaaacaccaagtttaagagctagaaatagcaagtttaaataaggctagtccgttatcagcgtgaaaacgcggcaccgagtcggtgcttaaggaaaacatcatatttggtgtttcctatgatgtcatcgcggttctatctagttacgcgttaaaccaactagaa

SEQ ID NO: 3171 - RNA, 197 nt, synthetic construct
  source 1..197: mol_type = other RNA
gtctgtatctatattcatcatgtttaagagcggggaaatccgcaagtttaaataaggctagtccgttatcagcgtgaaaacgcggcaccgagtcggtgctatgccggggaccatcaaagaaaatatcatctttggtgtctcgtacgatgaatatagataccgcggttctatctagttacgcgttaaaccaactagaa

SEQ ID NO: 3172 - RNA, 174 nt, synthetic construct
  source 1..174: mol_type = other RNA
gttcatcataggaaacaccaagtttaagagctagaaatagcaagtttaaataaggctagtccgttatcagcgtgaaaacgcggcaccgagtcggtgcttaaggaaaatatcatatttggtgtttcctatgatgtcatcgcggttctatctagttacgcgttaaaccaactagaa

SEQ ID NO: 3173 - RNA, 197 nt, synthetic construct
  source 1..197: mol_type = other RNA
gtctgtatctatattcatcatgtttaagagcggggaaatccgcaagtttaaataaggctagtccgttatcagcgtgaaaacgcggcaccgagtcggtgctatgccgggcaccatcaaagagaatatcatctttggtgtctcgtacgatgaatatagataccgcggttctatctagttacgcgttaaaccaactagaa

SEQ ID NO: 3174 - RNA, 174 nt, synthetic construct
  source 1..174: mol_type = other RNA
gttcatcataggaaacaccaagtttaagagctagaaatagcaagtttaaataaggctagtccgttatcagcgtgaaaacgcggcaccgagtcggtgcttaaagagaacatcatatttggtgtttcctatgatgctatcgcggttctatctagttacgcgttaaaccaactagaa

SEQ ID NO: 3175 - RNA, 197 nt, synthetic construct
  source 1..197: mol_type = other RNA
gtctgtatctatattcatcatgtttaagagcggggaaatccgcaagtttaaataaggctagtccgttatcagcgtgaaaacgcggcaccgagtcggtgctatgccggggaccatcaaagagaatatcatctttggtgtctcgtatgatgaatatagataccgcggttctatctagttacgcgttaaaccaactagaa

SEQ ID NO: 3176 - RNA, 174 nt, synthetic construct
  source 1..174: mol_type = other RNA
gttcatcataggaaacaccaagtttaagagctagaaatagcaagtttaaataaggctagtccgttatcagcgtgaaaacgcggcaccgagtcggtgcttaaagagaatatcatatttggtgtttcctatgatgctaccgcggttctatctagttacgcgttaaaccaactagaa

SEQ ID NO: 3177 - RNA, 197 nt, synthetic construct
  source 1..197: mol_type = other RNA
gtctgtatctatattcatcatgtttaagagcggggaaatccgcaagtttaaataaggctagtccgttatcagcgtgaaaacgcggcaccgagtcggtgctatgccggggaccatcaaagagaatatcatctttggtgtttcgtacgatgaatatagataccgcggttctatctagttacgcgttaaaccaactagaa

SEQ ID NO: 3178 - RNA, 174 nt, synthetic construct
  source 1..174: mol_type = other RNA
gttcatcataggaaacaccaagtttaagagctagaaatagcaagtttaaataaggctagtccgttatcagcgtgaaaacgcggcaccgagtcggtgcttaaggagaacatcatctttggtgtttcctatgatgtcatcgcggttctatctagttacgcgttaaaccaactagaa

SEQ ID NO: 3179 - RNA, 197 nt, synthetic construct
  source 1..197: mol_type = other RNA
gtctgtatctatattcatcatgtttaagagcggggaaatccgcaagtttaaataaggctagtccgttatcagcgtgaaaacgcggcaccgagtcggtgctatgcctgggaccattaaagagaatatcatctttggtgtctcgtacgatgaatatagataccgcggttctatctagttacgcgttaaaccaactagaa

SEQ ID NO: 3180 - RNA, 174 nt, synthetic construct
  source 1..174: mol_type = other RNA
gttcatcataggaaacaccaagtttaagagctagaaatagcaagtttaaataaggctagtccgttatcagcgtgaaaacgcggcaccgagtcggtgcttaaggagaatatcatctttggtgtttcctatgatgtcttcgcggttctatctagttacgcgttaaaccaactagaa

SEQ ID NO: 3181 - RNA, 197 nt, synthetic construct
  source 1..197: mol_type = other RNA
gtctgtatctatattcatcatgtttaagagcggggaaatccgcaagtttaaataaggctagtccgttatcagcgtgaaaacgcggcaccgagtcggtgctatgcctgggaccatcaaagaaaatatcatctttggtgtctcgtacgatgaatatagataccgcggttctatctagttacgcgttaaaccaactagaa

SEQ ID NO: 3182 - RNA, 174 nt, synthetic construct
  source 1..174: mol_type = other RNA
gttcatcataggaaacaccaagtttaagagctagaaatagcaagtttaaataaggctagtccgttatcagcgtgaaaacgcggcaccgagtcggtgcttaaagaaaatattatctttggtgtttcctatgatgtcttcgcggttctatctagttacgcgttaaaccaactagaa

SEQ ID NO: 3183 - RNA, 197 nt, synthetic construct
  source 1..197: mol_type = other RNA
gtctgtatctatattcatcatgtttaagagcggggaaatccgcaagtttaaataaggctagtccgttatcagcgtgaaaacgcggcaccgagtcggtgctatgccggggaccattaaagaaaatatcatctttggtgtctcgtacgatgaatatagataccgcggttctatctagttacgcgttaaaccaactagaa

SEQ ID NO: 3184 - RNA, 174 nt, synthetic construct
  source 1..174: mol_type = other RNA
gttcatcataggaaacaccaagtttaagagctagaaatagcaagtttaaataaggctagtccgttatcagcgtgaaaacgcggcaccgagtcggtgcttaaagaaaacatcatatttggtgtttcctatgatgtctccgcggttctatctagttacgcgttaaaccaactagaa

SEQ ID NO: 3185 - RNA, 197 nt, synthetic construct
  source 1..197: mol_type = other RNA
gtctgtatctatattcatcatgtttaagagcggggaaatccgcaagtttaaataaggctagtccgttatcagcgtgaaaacgcggcaccgagtcggtgctatgcctggcaccatcaaagagaatatcatctttggtgtctcgtacgatgaatatagataccgcggttctatctagttacgcgttaaaccaactagaa

SEQ ID NO: 3186 - RNA, 174 nt, synthetic construct
  source 1..174: mol_type = other RNA
gttcatcataggaaacaccaagtttaagagctagaaatagcaagtttaaataaggctagtccgttatcagcgtgaaaacgcggcaccgagtcggtgcttaaagaaaatatcatatttggtgtttcctatgatgcttccgcggttctatctagttacgcgttaaaccaactagaa

SEQ ID NO: 3187 - RNA, 197 nt, synthetic construct
  source 1..197: mol_type = other RNA
gtctgtatctatattcatcatgtttaagagcggggaaatccgcaagtttaaataaggctagtccgttatcagcgtgaaaacgcggcaccgagtcggtgctatgcctgggaccatcaaagagaatatcatctttggtgtctcgtatgatgaatatagataccgcggttctatctagttacgcgttaaaccaactagaa

SEQ ID NO: 3188 - RNA, 174 nt, synthetic construct
  source 1..174: mol_type = other RNA
gttcatcataggaaacaccaagtttaagagctagaaatagcaagtttaaataaggctagtccgttatcagcgtgaaaacgcggcaccgagtcggtgcttaaggaaaacatcatctttggtgtttcctatgatgtcttcgcggttctatctagttacgcgttaaaccaactagaa

SEQ ID NO: 3189 - RNA, 197 nt, synthetic construct
  source 1..197: mol_type = other RNA
gtctgtatctatattcatcatgtttaagagcggggaaatccgcaagtttaaataaggctagtccgttatcagcgtgaaaacgcggcaccgagtcggtgctatgcctgggaccatcaaagagaatatcatctttggtgtttcgtacgatgaatatagataccgcggttctatctagttacgcgttaaaccaactagaa

SEQ ID NO: 3190 - RNA, 174 nt, synthetic construct
  source 1..174: mol_type = other RNA
gttcatcataggaaacaccaagtttaagagctagaaatagcaagtttaaataaggctagtccgttatcagcgtgaaaacgcggcaccgagtcggtgcttaaggaaaatatcatctttggtgtttcctatgatgtcttcgcggttctatctagttacgcgttaaaccaactagaa

SEQ ID NO: 3191 - RNA, 197 nt, synthetic construct
  source 1..197: mol_type = other RNA
gtctgtatctatattcatcatgtttaagagcggggaaatccgcaagtttaaataaggctagtccgttatcagcgtgaaaacgcggcaccgagtcggtgctatgccgggcaccattaaagagaatatcatctttggtgtctcgtacgatgaatatagataccgcggttctatctagttacgcgttaaaccaactagaa

SEQ ID NO: 3192 - RNA, 174 nt, synthetic construct
  source 1..174: mol_type = other RNA
gttcatcataggaaacaccaagtttaagagctagaaatagcaagtttaaataaggctagtccgttatcagcgtgaaaacgcggcaccgagtcggtgcttaaagagaacatcatctttggtgtttcctatgatgtcatcgcggttctatctagttacgcgttaaaccaactagaa

SEQ ID NO: 3193 - RNA, 197 nt, synthetic construct
  source 1..197: mol_type = other RNA
gtctgtatctatattcatcatgtttaagagcggggaaatccgcaagtttaaataaggctagtccgttatcagcgtgaaaacgcggcaccgagtcggtgctatgccggggaccattaaagagaatatcatctttggtgtctcgtatgatgaatatagataccgcggttctatctagttacgcgttaaaccaactagaa

SEQ ID NO: 3194 - RNA, 174 nt, synthetic construct
  source 1..174: mol_type = other RNA
gttcatcataggaaacaccaagtttaagagctagaaatagcaagtttaaataaggctagtccgttatcagcgtgaaaacgcggcaccgagtcggtgcttaaagagaatatcatctttggtgtttcctatgatgtcttcgcggttctatctagttacgcgttaaaccaactagaa

SEQ ID NO: 3195 - RNA, 197 nt, synthetic construct
  source 1..197: mol_type = other RNA
gtctgtatctatattcatcatgtttaagagcggggaaatccgcaagtttaaataaggctagtccgttatcagcgtgaaaacgcggcaccgagtcggtgctatgccgggcaccatcaaagaaaatatcatctttggtgtctcgtacgatgaatatagataccgcggttctatctagttacgcgttaaaccaactagaa

SEQ ID NO: 3196 - RNA, 174 nt, synthetic construct
  source 1..174: mol_type = other RNA
gttcatcataggaaacaccaagtttaagagctagaaatagcaagtttaaataaggctagtccgttatcagcgtgaaaacgcggcaccgagtcggtgcttaaagaaaacatcatctttggtgtttcctatgatgtcttcgcggttctatctagttacgcgttaaaccaactagaa

SEQ ID NO: 3197 - RNA, 197 nt, synthetic construct
  source 1..197: mol_type = other RNA
gtctgtatctatattcatcatgtttaagagcggggaaatccgcaagtttaaataaggctagtccgttatcagcgtgaaaacgcggcaccgagtcggtgctatgccggggaccatcaaagaaaatatcatctttggtgtctcgtatgatgaatatagataccgcggttctatctagttacgcgttaaaccaactagaa

SEQ ID NO: 3198 - RNA, 174 nt, synthetic construct
  source 1..174: mol_type = other RNA
gttcatcataggaaacaccaagtttaagagctagaaatagcaagtttaaataaggctagtccgttatcagcgtgaaaacgcggcaccgagtcggtgcttaaagaaaatatcatctttggtgtttcctatgatgtcatcgcggttctatctagttacgcgttaaaccaactagaa

SEQ ID NO: 3199 - RNA, 197 nt, synthetic construct
  source 1..197: mol_type = other RNA
gtctgtatctatattcatcatgtttaagagcggggaaatccgcaagtttaaataaggctagtccgttatcagcgtgaaaacgcggcaccgagtcggtgctatgccggggaccattaaagagaatatcatctttggtgtttcgtacgatgaatatagataccgcggttctatctagttacgcgttaaaccaactagaa

SEQ ID NO: 3200 - RNA, 174 nt, synthetic construct
  source 1..174: mol_type = other RNA
gttcatcataggaaacaccaagtttaagagctagaaatagcaagtttaaataaggctagtccgttatcagcgtgaaaacgcggcaccgagtcggtgctcaaagaaaatatcatctttggtgtttcctatgatgtcatcgcggttctatctagttacgcgttaaaccaactagaa

SEQ ID NO: 3201 - RNA, 197 nt, synthetic construct
  source 1..197: mol_type = other RNA
gtctgtatctatattcatcatgtttaagagcggggaaatccgcaagtttaaataaggctagtccgttatcagcgtgaaaacgcggcaccgagtcggtgctatgccggggaccatcaaagaaaatatcatctttggtgtttcgtacgatgaatatagataccgcggttctatctagttacgcgttaaaccaactagaa

SEQ ID NO: 3202 - RNA, 174 nt, synthetic construct
  source 1..174: mol_type = other RNA
gttcatcataggaaacaccaagtttaagagctagaaatagcaagtttaaataaggctagtccgttatcagcgtgaaaacgcggcaccgagtcggtgctaaaagaaaatatcatctttggtgtttcctatgatgtcctcgcggttctatctagttacgcgttaaaccaactagaa

SEQ ID NO: 3203 - RNA, 197 nt, synthetic construct
  source 1..197: mol_type = other RNA
gtctgtatctatattcatcatgtttaagagcggggaaatccgcaagtttaaataaggctagtccgttatcagcgtgaaaacgcggcaccgagtcggtgctatgccggggaccatcaaagagaatatcatctttggtgtctcctacgatgaatatagataccgcggttctatctagttacgcgttaaaccaactagaa

SEQ ID NO: 3204 - RNA, 174 nt, synthetic construct
  source 1..174: mol_type = other RNA
gttcatcataggaaacaccaagtttaagagctagaaatagcaagtttaaataaggctagtccgttatcagcgtgaaaacgcggcaccgagtcggtgcttaaagaaaatatcatttttggtgtttcctatgatgtcttcgcggttctatctagttacgcgttaaaccaactagaa

SEQ ID NO: 3205 - RNA, 197 nt, synthetic construct
  source 1..197: mol_type = other RNA
gtctgtatctatattcatcatgtttaagagcggggaaatccgcaagtttaaataaggctagtccgttatcagcgtgaaaacgcggcaccgagtcggtgctatgccgggcaccatcaaagagaatatcatctttggtgtctcgtatgatgaatatagataccgcggttctatctagttacgcgttaaaccaactagaa

SEQ ID NO: 3206 - RNA, 197 nt, synthetic construct
  source 1..197: mol_type = other RNA
gtctgtatctatattcatcatgtttaagagcggggaaatccgcaagtttaaataaggctagtccgttatcagcgtgaaaacgcggcaccgagtcggtgctatgccgggcaccatcaaagagaatatcatctttggtgtttcgtacgatgaatatagataccgcggttctatctagttacgcgttaaaccaactagaa

SEQ ID NO: 3207 - RNA, 197 nt, synthetic construct
  source 1..197: mol_type = other RNA
gtctgtatctatattcatcatgtttaagagcggggaaatccgcaagtttaaataaggctagtccgttatcagcgtgaaaacgcggcaccgagtcggtgctatgccggggaccatcaaagagaatatcatctttggtgtttcgtatgatgaatatagataccgcggttctatctagttacgcgttaaaccaactagaa

SEQ ID NO: 3208 - RNA, 197 nt, synthetic construct
  source 1..197: mol_type = other RNA
gtctgtatctatattcatcatgtttaagagcggggaaatccgcaagtttaaataaggctagtccgttatcagcgtgaaaacgcggcaccgagtcggtgctatgcctgggaccattaaagaaaatatcatctttggtgtctcgtacgatgaatatagataccgcggttctatctagttacgcgttaaaccaactagaa

SEQ ID NO: 3209 - RNA, 197 nt, synthetic construct
  source 1..197: mol_type = other RNA
gtctgtatctatattcatcatgtttaagagcggggaaatccgcaagtttaaataaggctagtccgttatcagcgtgaaaacgcggcaccgagtcggtgctatgcctggcaccattaaagagaatatcatctttggtgtctcgtacgatgaatatagataccgcggttctatctagttacgcgttaaaccaactagaa

SEQ ID NO: 3210 - RNA, 197 nt, synthetic construct
  source 1..197: mol_type = other RNA
gtctgtatctatattcatcatgtttaagagcggggaaatccgcaagtttaaataaggctagtccgttatcagcgtgaaaacgcggcaccgagtcggtgctatgcctgggaccattaaagagaatatcatctttggtgtctcgtatgatgaatatagataccgcggttctatctagttacgcgttaaaccaactagaa

SEQ ID NO: 3211 - RNA, 197 nt, synthetic construct
  source 1..197: mol_type = other RNA
gtctgtatctatattcatcatgtttaagagcggggaaatccgcaagtttaaataaggctagtccgttatcagcgtgaaaacgcggcaccgagtcggtgctatgcctggcaccatcaaagaaaatatcatctttggtgtctcgtacgatgaatatagataccgcggttctatctagttacgcgttaaaccaactagaa

SEQ ID NO: 3212 - RNA, 197 nt, synthetic construct
  source 1..197: mol_type = other RNA
gtctgtatctatattcatcatgtttaagagcggggaaatccgcaagtttaaataaggctagtccgttatcagcgtgaaaacgcggcaccgagtcggtgctatgcctgggaccatcaaagaaaatatcatctttggtgtctcgtatgatgaatatagataccgcggttctatctagttacgcgttaaaccaactagaa

SEQ ID NO: 3213 - RNA, 197 nt, synthetic construct
  source 1..197: mol_type = other RNA
gtctgtatctatattcatcatgtttaagagcggggaaatccgcaagtttaaataaggctagtccgttatcagcgtgaaaacgcggcaccgagtcggtgctatgcctgggaccattaaagagaatatcatctttggtgtttcgtacgatgaatatagataccgcggttctatctagttacgcgttaaaccaactagaa

SEQ ID NO: 3214 - RNA, 197 nt, synthetic construct
  source 1..197: mol_type = other RNA
gtctgtatctatattcatcatgtttaagagcggggaaatccgcaagtttaaataaggctagtccgttatcagcgtgaaaacgcggcaccgagtcggtgctatgcctgggaccatcaaagaaaatatcatctttggtgtttcgtacgatgaatatagataccgcggttctatctagttacgcgttaaaccaactagaa

SEQ ID NO: 3215 - RNA, 197 nt, synthetic construct
  source 1..197: mol_type = other RNA
gtctgtatctatattcatcatgtttaagagcggggaaatccgcaagtttaaataaggctagtccgttatcagcgtgaaaacgcggcaccgagtcggtgctatgccgggcaccattaaagaaaatatcatctttggtgtctcgtacgatgaatatagataccgcggttctatctagttacgcgttaaaccaactagaa

SEQ ID NO: 3216 - RNA, 197 nt, synthetic construct
  source 1..197: mol_type = other RNA
gtctgtatctatattcatcatgtttaagagcggggaaatccgcaagtttaaataaggctagtccgttatcagcgtgaaaacgcggcaccgagtcggtgctatgccggggaccattaaagaaaatatcatctttggtgtctcgtatgatgaatatagataccgcggttctatctagttacgcgttaaaccaactagaa

SEQ ID NO: 3217 - RNA, 197 nt, synthetic construct
  source 1..197: mol_type = other RNA
gtctgtatctatattcatcatgtttaagagcggggaaatccgcaagtttaaataaggctagtccgttatcagcgtgaaaacgcggcaccgagtcggtgctatgcctgggaccatcaaagagaatatcatctttggtgtctcctacgatgaatatagataccgcggttctatctagttacgcgttaaaccaactagaa

SEQ ID NO: 3218 - RNA, 197 nt, synthetic construct
  source 1..197: mol_type = other RNA
gtctgtatctatattcatcatgtttaagagcggggaaatccgcaagtttaaataaggctagtccgttatcagcgtgaaaacgcggcaccgagtcggtgctatgcctggcaccatcaaagagaatatcatctttggtgtctcgtatgatgaatatagataccgcggttctatctagttacgcgttaaaccaactagaa

SEQ ID NO: 3219 - RNA, 197 nt, synthetic construct
  source 1..197: mol_type = other RNA
gtctgtatctatattcatcatgtttaagagcggggaaatccgcaagtttaaataaggctagtccgttatcagcgtgaaaacgcggcaccgagtcggtgctatgccggggaccattaaagaaaatatcatctttggtgtttcgtacgatgaatatagataccgcggttctatctagttacgcgttaaaccaactagaa

SEQ ID NO: 3220 - RNA, 197 nt, synthetic construct
  source 1..197: mol_type = other RNA
gtctgtatctatattcatcatgtttaagagcggggaaatccgcaagtttaaataaggctagtccgttatcagcgtgaaaacgcggcaccgagtcggtgctatgcctggcaccatcaaagagaatatcatctttggtgtttcgtacgatgaatatagataccgcggttctatctagttacgcgttaaaccaactagaa

SEQ ID NO: 3221 - RNA, 197 nt, synthetic construct
  source 1..197: mol_type = other RNA
gtctgtatctatattcatcatgtttaagagcggggaaatccgcaagtttaaataaggctagtccgttatcagcgtgaaaacgcggcaccgagtcggtgctatgcctgggaccatcaaagagaatatcatctttggtgtttcgtatgatgaatatagataccgcggttctatctagttacgcgttaaaccaactagaa

SEQ ID NO: 3222 - RNA, 197 nt, synthetic construct
  source 1..197: mol_type = other RNA
gtctgtatctatattcatcatgtttaagagcggggaaatccgcaagtttaaataaggctagtccgttatcagcgtgaaaacgcggcaccgagtcggtgctatgccggggaccattaaagagaatatcatctttggtgtctcctacgatgaatatagataccgcggttctatctagttacgcgttaaaccaactagaa

SEQ ID NO: 3223 - RNA, 197 nt, synthetic construct
  source 1..197: mol_type = other RNA
gtctgtatctatattcatcatgtttaagagcggggaaatccgcaagtttaaataaggctagtccgttatcagcgtgaaaacgcggcaccgagtcggtgctatgccgggcaccattaaagagaatatcatctttggtgtctcgtatgatgaatatagataccgcggttctatctagttacgcgttaaaccaactagaa

SEQ ID NO: 3224 - RNA, 197 nt, synthetic construct
  source 1..197: mol_type = other RNA
gtctgtatctatattcatcatgtttaagagcggggaaatccgcaagtttaaataaggctagtccgttatcagcgtgaaaacgcggcaccgagtcggtgctatgccggggaccatcaaagaaaatatcatctttggtgtctcctacgatgaatatagataccgcggttctatctagttacgcgttaaaccaactagaa

SEQ ID NO: 3225 - RNA, 197 nt, synthetic construct
  source 1..197: mol_type = other RNA
gtctgtatctatattcatcatgtttaagagcggggaaatccgcaagtttaaataaggctagtccgttatcagcgtgaaaacgcggcaccgagtcggtgctatgccgggcaccatcaaagaaaatatcatctttggtgtctcgtatgatgaatatagataccgcggttctatctagttacgcgttaaaccaactagaa

SEQ ID NO: 3226 - RNA, 197 nt, synthetic construct
  source 1..197: mol_type = other RNA
gtctgtatctatattcatcatgtttaagagcggggaaatccgcaagtttaaataaggctagtccgttatcagcgtgaaaacgcggcaccgagtcggtgctatgccgggcaccattaaagagaatatcatctttggtgtttcgtacgatgaatatagataccgcggttctatctagttacgcgttaaaccaactagaa

SEQ ID NO: 3227 - RNA, 197 nt, synthetic construct
  source 1..197: mol_type = other RNA
gtctgtatctatattcatcatgtttaagagcggggaaatccgcaagtttaaataaggctagtccgttatcagcgtgaaaacgcggcaccgagtcggtgctatgccggggaccattaaagagaatatcatctttggtgtttcgtatgatgaatatagataccgcggttctatctagttacgcgttaaaccaactagaa

SEQ ID NO: 3228 - RNA, 197 nt, synthetic construct
  source 1..197: mol_type = other RNA
gtctgtatctatattcatcatgtttaagagcggggaaatccgcaagtttaaataaggctagtccgttatcagcgtgaaaacgcggcaccgagtcggtgctatgccgggcaccatcaaagaaaatatcatctttggtgtttcgtacgatgaatatagataccgcggttctatctagttacgcgttaaaccaactagaa

SEQ ID NO: 3229 - RNA, 197 nt, synthetic construct
  source 1..197: mol_type = other RNA
gtctgtatctatattcatcatgtttaagagcggggaaatccgcaagtttaaataaggctagtccgttatcagcgtgaaaacgcggcaccgagtcggtgctatgccggggaccatcaaagaaaatatcatctttggtgtttcgtatgatgaatatagataccgcggttctatctagttacgcgttaaaccaactagaa

SEQ ID NO: 3230 - RNA, 197 nt, synthetic construct
  source 1..197: mol_type = other RNA
gtctgtatctatattcatcatgtttaagagcggggaaatccgcaagtttaaataaggctagtccgttatcagcgtgaaaacgcggcaccgagtcggtgctatgccgggcaccatcaaagagaatatcatctttggtgtctcctacgatgaatatagataccgcggttctatctagttacgcgttaaaccaactagaa

SEQ ID NO: 3231 - RNA, 197 nt, synthetic construct
  source 1..197: mol_type = other RNA
gtctgtatctatattcatcatgtttaagagcggggaaatccgcaagtttaaataaggctagtccgttatcagcgtgaaaacgcggcaccgagtcggtgctatgccggggaccatcaaagagaatatcatctttggtgtctcctatgatgaatatagataccgcggttctatctagttacgcgttaaaccaactagaa

SEQ ID NO: 3232 - RNA, 197 nt, synthetic construct
  source 1..197: mol_type = other RNA
gtctgtatctatattcatcatgtttaagagcggggaaatccgcaagtttaaataaggctagtccgttatcagcgtgaaaacgcggcaccgagtcggtgctatgccggggaccatcaaagagaatatcatctttggtgtttcctacgatgaatatagataccgcggttctatctagttacgcgttaaaccaactagaa

SEQ ID NO: 3233 - RNA, 197 nt, synthetic construct
  source 1..197: mol_type = other RNA
gtctgtatctatattcatcatgtttaagagcggggaaatccgcaagtttaaataaggctagtccgttatcagcgtgaaaacgcggcaccgagtcggtgctatgccgggcaccatcaaagagaatatcatctttggtgtttcgtatgatgaatatagataccgcggttctatctagttacgcgttaaaccaactagaa

SEQ ID NO: 3234 - RNA, 197 nt, synthetic construct
  source 1..197: mol_type = other RNA
gtctgtatctatattcatcatgtttaagagcggggaaatccgcaagtttaaataaggctagtccgttatcagcgtgaaaacgcggcaccgagtcggtgctatgcctggcaccattaaagaaaatatcatctttggtgtctcgtacgatgaatatagataccgcggttctatctagttacgcgttaaaccaactagaa

SEQ ID NO: 3235 - RNA, 197 nt, synthetic construct
  source 1..197: mol_type = other RNA
gtctgtatctatattcatcatgtttaagagcggggaaatccgcaagtttaaataaggctagtccgttatcagcgtgaaaacgcggcaccgagtcggtgctatgcctgggaccattaaagaaaatatcatctttggtgtctcgtatgatgaatatagataccgcggttctatctagttacgcgttaaaccaactagaa

SEQ ID NO: 3236 - RNA, 197 nt, synthetic construct
  source 1..197: mol_type = other RNA
gtctgtatctatattcatcatgtttaagagcggggaaatccgcaagtttaaataaggctagtccgttatcagcgtgaaaacgcggcaccgagtcggtgctatgcctgggaccattaaagaaaatatcatctttggtgtttcgtacgatgaatatagataccgcggttctatctagttacgcgttaaaccaactagaa

SEQ ID NO: 3237 - RNA, 197 nt, synthetic construct
  source 1..197: mol_type = other RNA
gtctgtatctatattcatcatgtttaagagcggggaaatccgcaagtttaaataaggctagtccgttatcagcgtgaaaacgcggcaccgagtcggtgctatgcctgggaccattaaagagaatatcatctttggtgtctcctacgatgaatatagataccgcggttctatctagttacgcgttaaaccaactagaa

SEQ ID NO: 3238 - RNA, 197 nt, synthetic construct
  source 1..197: mol_type = other RNA
gtctgtatctatattcatcatgtttaagagcggggaaatccgcaagtttaaataaggctagtccgttatcagcgtgaaaacgcggcaccgagtcggtgctatgcctggcaccattaaagagaatatcatctttggtgtctcgtatgatgaatatagataccgcggttctatctagttacgcgttaaaccaactagaa

SEQ ID NO: 3239 - RNA, 197 nt, synthetic construct
  source 1..197: mol_type = other RNA
gtctgtatctatattcatcatgtttaagagcggggaaatccgcaagtttaaataaggctagtccgttatcagcgtgaaaacgcggcaccgagtcggtgctatgcctgggaccatcaaagaaaatatcatctttggtgtctcctacgatgaatatagataccgcggttctatctagttacgcgttaaaccaactagaa

SEQ ID NO: 3240 - RNA, 197 nt, synthetic construct
  source 1..197: mol_type = other RNA
gtctgtatctatattcatcatgtttaagagcggggaaatccgcaagtttaaataaggctagtccgttatcagcgtgaaaacgcggcaccgagtcggtgctatgcctggcaccatcaaagaaaatatcatctttggtgtctcgtatgatgaatatagataccgcggttctatctagttacgcgttaaaccaactagaa

SEQ ID NO: 3241 - RNA, 197 nt, synthetic construct
  source 1..197: mol_type = other RNA
gtctgtatctatattcatcatgtttaagagcggggaaatccgcaagtttaaataaggctagtccgttatcagcgtgaaaacgcggcaccgagtcggtgctatgcctggcaccattaaagagaatatcatctttggtgtttcgtacgatgaatatagataccgcggttctatctagttacgcgttaaaccaactagaa

SEQ ID NO: 3242 - RNA, 197 nt, synthetic construct
  source 1..197: mol_type = other RNA
gtctgtatctatattcatcatgtttaagagcggggaaatccgcaagtttaaataaggctagtccgttatcagcgtgaaaacgcggcaccgagtcggtgctatgcctgggaccattaaagagaatatcatctttggtgtttcgtatgatgaatatagataccgcggttctatctagttacgcgttaaaccaactagaa

SEQ ID NO: 3243 - RNA, 197 nt, synthetic construct
  source 1..197: mol_type = other RNA
gtctgtatctatattcatcatgtttaagagcggggaaatccgcaagtttaaataaggctagtccgttatcagcgtgaaaacgcggcaccgagtcggtgctatgcctggcaccatcaaagaaaatatcatctttggtgtttcgtacgatgaatatagataccgcggttctatctagttacgcgttaaaccaactagaa

SEQ ID NO: 3244 - RNA, 197 nt, synthetic construct
  source 1..197: mol_type = other RNA
gtctgtatctatattcatcatgtttaagagcggggaaatccgcaagtttaaataaggctagtccgttatcagcgtgaaaacgcggcaccgagtcggtgctatgcctgggaccatcaaagaaaatatcatctttggtgtttcgtatgatgaatatagataccgcggttctatctagttacgcgttaaaccaactagaa

SEQ ID NO: 3245 - RNA, 197 nt, synthetic construct
  source 1..197: mol_type = other RNA
gtctgtatctatattcatcatgtttaagagcggggaaatccgcaagtttaaataaggctagtccgttatcagcgtgaaaacgcggcaccgagtcggtgctatgccggggaccattaaagaaaatatcatctttggtgtctcctacgatgaatatagataccgcggttctatctagttacgcgttaaaccaactagaa

SEQ ID NO: 3246 - RNA, 197 nt, synthetic construct
  source 1..197: mol_type = other RNA
gtctgtatctatattcatcatgtttaagagcggggaaatccgcaagtttaaataaggctagtccgttatcagcgtgaaaacgcggcaccgagtcggtgctatgccgggcaccattaaagaaaatatcatctttggtgtctcgtatgatgaatatagataccgcggttctatctagttacgcgttaaaccaactagaa

SEQ ID NO: 3247 - RNA, 197 nt, synthetic construct
  source 1..197: mol_type = other RNA
gtctgtatctatattcatcatgtttaagagcggggaaatccgcaagtttaaataaggctagtccgttatcagcgtgaaaacgcggcaccgagtcggtgctatgcctggcaccatcaaagagaatatcatctttggtgtctcctacgatgaatatagataccgcggttctatctagttacgcgttaaaccaactagaa

SEQ ID NO: 3248 - RNA, 197 nt, synthetic construct
  source 1..197: mol_type = other RNA
gtctgtatctatattcatcatgtttaagagcggggaaatccgcaagtttaaataaggctagtccgttatcagcgtgaaaacgcggcaccgagtcggtgctatgcctgggaccatcaaagagaatatcatctttggtgtctcctatgatgaatatagataccgcggttctatctagttacgcgttaaaccaactagaa

SEQ ID NO: 3249 - RNA, 197 nt, synthetic construct
  source 1..197: mol_type = other RNA
gtctgtatctatattcatcatgtttaagagcggggaaatccgcaagtttaaataaggctagtccgttatcagcgtgaaaacgcggcaccgagtcggtgctatgccgggcaccattaaagaaaatatcatctttggtgtttcgtacgatgaatatagataccgcggttctatctagttacgcgttaaaccaactagaa

SEQ ID NO: 3250 - RNA, 197 nt, synthetic construct
  source 1..197: mol_type = other RNA
gtctgtatctatattcatcatgtttaagagcggggaaatccgcaagtttaaataaggctagtccgttatcagcgtgaaaacgcggcaccgagtcggtgctatgccggggaccattaaagaaaatatcatctttggtgtttcgtatgatgaatatagataccgcggttctatctagttacgcgttaaaccaactagaa

SEQ ID NO: 3251 - RNA, 197 nt, synthetic construct
  source 1..197: mol_type = other RNA
gtctgtatctatattcatcatgtttaagagcggggaaatccgcaagtttaaataaggctagtccgttatcagcgtgaaaacgcggcaccgagtcggtgctatgcctgggaccatcaaagagaatatcatctttggtgtttcctacgatgaatatagataccgcggttctatctagttacgcgttaaaccaactagaa

SEQ ID NO: 3252 - RNA, 197 nt, synthetic construct
  source 1..197: mol_type = other RNA
gtctgtatctatattcatcatgtttaagagcggggaaatccgcaagtttaaataaggctagtccgttatcagcgtgaaaacgcggcaccgagtcggtgctatgcctggcaccatcaaagagaatatcatctttggtgtttcgtatgatgaatatagataccgcggttctatctagttacgcgttaaaccaactagaa

SEQ ID NO: 3253 - RNA, 197 nt, synthetic construct
  source 1..197: mol_type = other RNA
gtctgtatctatattcatcatgtttaagagcggggaaatccgcaagtttaaataaggctagtccgttatcagcgtgaaaacgcggcaccgagtcggtgctatgccgggcaccattaaagagaatatcatctttggtgtctcctacgatgaatatagataccgcggttctatctagttacgcgttaaaccaactagaa

SEQ ID NO: 3254 - RNA, 197 nt, synthetic construct
  source 1..197: mol_type = other RNA
gtctgtatctatattcatcatgtttaagagcggggaaatccgcaagtttaaataaggctagtccgttatcagcgtgaaaacgcggcaccgagtcggtgctatgccggggaccattaaagagaatatcatctttggtgtctcctatgatgaatatagataccgcggttctatctagttacgcgttaaaccaactagaa

SEQ ID NO: 3255 - RNA, 197 nt, synthetic construct
  source 1..197: mol_type = other RNA
gtctgtatctatattcatcatgtttaagagcggggaaatccgcaagtttaaataaggctagtccgttatcagcgtgaaaacgcggcaccgagtcggtgctatgccgggcaccatcaaagaaaatatcatctttggtgtctcctacgatgaatatagataccgcggttctatctagttacgcgttaaaccaactagaa

SEQ ID NO: 3256 - RNA, 197 nt, synthetic construct
  source 1..197: mol_type = other RNA
gtctgtatctatattcatcatgtttaagagcggggaaatccgcaagtttaaataaggctagtccgttatcagcgtgaaaacgcggcaccgagtcggtgctatgccggggaccatcaaagaaaatatcatctttggtgtctcctatgatgaatatagataccgcggttctatctagttacgcgttaaaccaactagaa

SEQ ID NO: 3257 - RNA, 197 nt, synthetic construct
  source 1..197: mol_type = other RNA
gtctgtatctatattcatcatgtttaagagcggggaaatccgcaagtttaaataaggctagtccgttatcagcgtgaaaacgcggcaccgagtcggtgctatgccggggaccattaaagagaatatcatctttggtgtttcctacgatgaatatagataccgcggttctatctagttacgcgttaaaccaactagaa

SEQ ID NO: 3258 - RNA, 197 nt, synthetic construct
  source 1..197: mol_type = other RNA
gtctgtatctatattcatcatgtttaagagcggggaaatccgcaagtttaaataaggctagtccgttatcagcgtgaaaacgcggcaccgagtcggtgctatgccgggcaccattaaagagaatatcatctttggtgtttcgtatgatgaatatagataccgcggttctatctagttacgcgttaaaccaactagaa

SEQ ID NO: 3259 - RNA, 197 nt, synthetic construct
  source 1..197: mol_type = other RNA
gtctgtatctatattcatcatgtttaagagcggggaaatccgcaagtttaaataaggctagtccgttatcagcgtgaaaacgcggcaccgagtcggtgctatgccggggaccatcaaagaaaatatcatctttggtgtttcctacgatgaatatagataccgcggttctatctagttacgcgttaaaccaactagaa

SEQ ID NO: 3260 - RNA, 197 nt, synthetic construct
  source 1..197: mol_type = other RNA
gtctgtatctatattcatcatgtttaagagcggggaaatccgcaagtttaaataaggctagtccgttatcagcgtgaaaacgcggcaccgagtcggtgctatgccgggcaccatcaaagaaaatatcatctttggtgtttcgtatgatgaatatagataccgcggttctatctagttacgcgttaaaccaactagaa

SEQ ID NO: 3261 - RNA, 197 nt, synthetic construct
  source 1..197: mol_type = other RNA
gtctgtatctatattcatcatgtttaagagcggggaaatccgcaagtttaaataaggctagtccgttatcagcgtgaaaacgcggcaccgagtcggtgctatgccgggcaccatcaaagagaatatcatctttggtgtctcctatgatgaatatagataccgcggttctatctagttacgcgttaaaccaactagaa

SEQ ID NO: 3262 - RNA, 197 nt, synthetic construct
  source 1..197: mol_type = other RNA
gtctgtatctatattcatcatgtttaagagcggggaaatccgcaagtttaaataaggctagtccgttatcagcgtgaaaacgcggcaccgagtcggtgctatgccgggcaccatcaaagagaatatcatctttggtgtttcctacgatgaatatagataccgcggttctatctagttacgcgttaaaccaactagaa

SEQ ID NO: 3263 - RNA, 197 nt, synthetic construct
  source 1..197: mol_type = other RNA
gtctgtatctatattcatcatgtttaagagcggggaaatccgcaagtttaaataaggctagtccgttatcagcgtgaaaacgcggcaccgagtcggtgctatgccggggaccatcaaagagaatatcatctttggtgtttcctatgatgaatatagataccgcggttctatctagttacgcgttaaaccaactagaa

SEQ ID NO: 3264 - RNA, 197 nt, synthetic construct
  source 1..197: mol_type = other RNA
gtctgtatctatattcatcatgtttaagagcggggaaatccgcaagtttaaataaggctagtccgttatcagcgtgaaaacgcggcaccgagtcggtgctatgcctgggaccattaaagaaaatatcatctttggtgtctcctacgatgaatatagataccgcggttctatctagttacgcgttaaaccaactagaa

SEQ ID NO: 3265 - RNA, 197 nt, synthetic construct
  source 1..197: mol_type = other RNA
gtctgtatctatattcatcatgtttaagagcggggaaatccgcaagtttaaataaggctagtccgttatcagcgtgaaaacgcggcaccgagtcggtgctatgcctggcaccattaaagaaaatatcatctttggtgtctcgtatgatgaatatagataccgcggttctatctagttacgcgttaaaccaactagaa

SEQ ID NO: 3266 - RNA, 197 nt, synthetic construct
  source 1..197: mol_type = other RNA
gtctgtatctatattcatcatgtttaagagcggggaaatccgcaagtttaaataaggctagtccgttatcagcgtgaaaacgcggcaccgagtcggtgctatgcctggcaccattaaagaaaatatcatctttggtgtttcgtacgatgaatatagataccgcggttctatctagttacgcgttaaaccaactagaa

SEQ ID NO: 3267 - RNA, 197 nt, synthetic construct
  source 1..197: mol_type = other RNA
gtctgtatctatattcatcatgtttaagagcggggaaatccgcaagtttaaataaggctagtccgttatcagcgtgaaaacgcggcaccgagtcggtgctatgcctgggaccattaaagaaaatatcatctttggtgtttcgtatgatgaatatagataccgcggttctatctagttacgcgttaaaccaactagaa

SEQ ID NO: 3268 - RNA, 197 nt, synthetic construct
  source 1..197: mol_type = other RNA
gtctgtatctatattcatcatgtttaagagcggggaaatccgcaagtttaaataaggctagtccgttatcagcgtgaaaacgcggcaccgagtcggtgctatgcctggcaccattaaagagaatatcatctttggtgtctcctacgatgaatatagataccgcggttctatctagttacgcgttaaaccaactagaa

SEQ ID NO: 3269 - RNA, 197 nt, synthetic construct
  source 1..197: mol_type = other RNA
gtctgtatctatattcatcatgtttaagagcggggaaatccgcaagtttaaataaggctagtccgttatcagcgtgaaaacgcggcaccgagtcggtgctatgcctgggaccattaaagagaatatcatctttggtgtctcctatgatgaatatagataccgcggttctatctagttacgcgttaaaccaactagaa

SEQ ID NO: 3270 - RNA, 197 nt, synthetic construct
  source 1..197: mol_type = other RNA
gtctgtatctatattcatcatgtttaagagcggggaaatccgcaagtttaaataaggctagtccgttatcagcgtgaaaacgcggcaccgagtcggtgctatgcctggcaccatcaaagaaaatatcatctttggtgtctcctacgatgaatatagataccgcggttctatctagttacgcgttaaaccaactagaa

SEQ ID NO: 3271 - RNA, 197 nt, synthetic construct
  source 1..197: mol_type = other RNA
gtctgtatctatattcatcatgtttaagagcggggaaatccgcaagtttaaataaggctagtccgttatcagcgtgaaaacgcggcaccgagtcggtgctatgcctgggaccatcaaagaaaatatcatctttggtgtctcctatgatgaatatagataccgcggttctatctagttacgcgttaaaccaactagaa

SEQ ID NO: 3272 - RNA, 197 nt, synthetic construct
  source 1..197: mol_type = other RNA
gtctgtatctatattcatcatgtttaagagcggggaaatccgcaagtttaaataaggctagtccgttatcagcgtgaaaacgcggcaccgagtcggtgctatgcctgggaccattaaagagaatatcatctttggtgtttcctacgatgaatatagataccgcggttctatctagttacgcgttaaaccaactagaa

SEQ ID NO: 3273 - RNA, 197 nt, synthetic construct
  source 1..197: mol_type = other RNA
gtctgtatctatattcatcatgtttaagagcggggaaatccgcaagtttaaataaggctagtccgttatcagcgtgaaaacgcggcaccgagtcggtgctatgcctggcaccattaaagagaatatcatctttggtgtttcgtatgatgaatatagataccgcggttctatctagttacgcgttaaaccaactagaa

SEQ ID NO: 3274 - RNA, 197 nt, synthetic construct
  source 1..197: mol_type = other RNA
gtctgtatctatattcatcatgtttaagagcggggaaatccgcaagtttaaataaggctagtccgttatcagcgtgaaaacgcggcaccgagtcggtgctatgcctgggaccatcaaagaaaatatcatctttggtgtttcctacgatgaatatagataccgcggttctatctagttacgcgttaaaccaactagaa

SEQ ID NO: 3275 - RNA, 197 nt, synthetic construct
  source 1..197: mol_type = other RNA
gtctgtatctatattcatcatgtttaagagcggggaaatccgcaagtttaaataaggctagtccgttatcagcgtgaaaacgcggcaccgagtcggtgctatgcctggcaccatcaaagaaaatatcatctttggtgtttcgtatgatgaatatagataccgcggttctatctagttacgcgttaaaccaactagaa

SEQ ID NO: 3276 - RNA, 197 nt, synthetic construct
  source 1..197: mol_type = other RNA
gtctgtatctatattcatcatgtttaagagcggggaaatccgcaagtttaaataaggctagtccgttatcagcgtgaaaacgcggcaccgagtcggtgctatgccgggcaccattaaagaaaatatcatctttggtgtctcctacgatgaatatagataccgcggttctatctagttacgcgttaaaccaactagaa

SEQ ID NO: 3277 - RNA, 197 nt, synthetic construct
  source 1..197: mol_type = other RNA
gtctgtatctatattcatcatgtttaagagcggggaaatccgcaagtttaaataaggctagtccgttatcagcgtgaaaacgcggcaccgagtcggtgctatgccggggaccattaaagaaaatatcatctttggtgtctcctatgatgaatatagataccgcggttctatctagttacgcgttaaaccaactagaa

SEQ ID NO: 3278 - RNA, 197 nt, synthetic construct
  source 1..197: mol_type = other RNA
gtctgtatctatattcatcatgtttaagagcggggaaatccgcaagtttaaataaggctagtccgttatcagcgtgaaaacgcggcaccgagtcggtgctatgcctggcaccatcaaagagaatatcatctttggtgtctcctatgatgaatatagataccgcggttctatctagttacgcgttaaaccaactagaa

SEQ ID NO: 3279 - RNA, 197 nt, synthetic construct
  source 1..197: mol_type = other RNA
gtctgtatctatattcatcatgtttaagagcggggaaatccgcaagtttaaataaggctagtccgttatcagcgtgaaaacgcggcaccgagtcggtgctatgccggggaccattaaagaaaatatcatctttggtgtttcctacgatgaatatagataccgcggttctatctagttacgcgttaaaccaactagaa

SEQ ID NO: 3280 - RNA, 197 nt, synthetic construct
  source 1..197: mol_type = other RNA
gtctgtatctatattcatcatgtttaagagcggggaaatccgcaagtttaaataaggctagtccgttatcagcgtgaaaacgcggcaccgagtcggtgctatgccgggcaccattaaagaaaatatcatctttggtgtttcgtatgatgaatatagataccgcggttctatctagttacgcgttaaaccaactagaa

SEQ ID NO: 3281 - RNA, 197 nt, synthetic construct
  source 1..197: mol_type = other RNA
gtctgtatctatattcatcatgtttaagagcggggaaatccgcaagtttaaataaggctagtccgttatcagcgtgaaaacgcggcaccgagtcggtgctatgcctggcaccatcaaagagaatatcatctttggtgtttcctacgatgaatatagataccgcggttctatctagttacgcgttaaaccaactagaa

SEQ ID NO: 3282 - RNA, 197 nt, synthetic construct
  source 1..197: mol_type = other RNA
gtctgtatctatattcatcatgtttaagagcggggaaatccgcaagtttaaataaggctagtccgttatcagcgtgaaaacgcggcaccgagtcggtgctatgcctgggaccatcaaagagaatatcatctttggtgtttcctatgatgaatatagataccgcggttctatctagttacgcgttaaaccaactagaa

SEQ ID NO: 3283 - RNA, 197 nt, synthetic construct
  source 1..197: mol_type = other RNA
gtctgtatctatattcatcatgtttaagagcggggaaatccgcaagtttaaataaggctagtccgttatcagcgtgaaaacgcggcaccgagtcggtgctatgccgggcaccattaaagagaatatcatctttggtgtctcctatgatgaatatagataccgcggttctatctagttacgcgttaaaccaactagaa

SEQ ID NO: 3284 - RNA, 197 nt, synthetic construct
  source 1..197: mol_type = other RNA
gtctgtatctatattcatcatgtttaagagcggggaaatccgcaagtttaaataaggctagtccgttatcagcgtgaaaacgcggcaccgagtcggtgctatgccgggcaccatcaaagaaaatatcatctttggtgtctcctatgatgaatatagataccgcggttctatctagttacgcgttaaaccaactagaa

SEQ ID NO: 3285 - RNA, 197 nt, synthetic construct
  source 1..197: mol_type = other RNA
gtctgtatctatattcatcatgtttaagagcggggaaatccgcaagtttaaataaggctagtccgttatcagcgtgaaaacgcggcaccgagtcggtgctatgccgggcaccattaaagagaatatcatctttggtgtttcctacgatgaatatagataccgcggttctatctagttacgcgttaaaccaactagaa

SEQ ID NO: 3286 - RNA, 197 nt, synthetic construct
  source 1..197: mol_type = other RNA
gtctgtatctatattcatcatgtttaagagcggggaaatccgcaagtttaaataaggctagtccgttatcagcgtgaaaacgcggcaccgagtcggtgctatgccggggaccattaaagagaatatcatctttggtgtttcctatgatgaatatagataccgcggttctatctagttacgcgttaaaccaactagaa

SEQ ID NO: 3287 - RNA, 197 nt, synthetic construct
  source 1..197: mol_type = other RNA
gtctgtatctatattcatcatgtttaagagcggggaaatccgcaagtttaaataaggctagtccgttatcagcgtgaaaacgcggcaccgagtcggtgctatgccgggcaccatcaaagaaaatatcatctttggtgtttcctacgatgaatatagataccgcggttctatctagttacgcgttaaaccaactagaa

SEQ ID NO: 3288 - RNA, 197 nt, synthetic construct
  source 1..197: mol_type = other RNA
gtctgtatctatattcatcatgtttaagagcggggaaatccgcaagtttaaataaggctagtccgttatcagcgtgaaaacgcggcaccgagtcggtgctatgccggggaccatcaaagaaaatatcatctttggtgtttcctatgatgaatatagataccgcggttctatctagttacgcgttaaaccaactagaa

SEQ ID NO: 3289 - RNA, 197 nt, synthetic construct
  source 1..197: mol_type = other RNA
gtctgtatctatattcatcatgtttaagagcggggaaatccgcaagtttaaataaggctagtccgttatcagcgtgaaaacgcggcaccgagtcggtgctatgccgggcaccatcaaagagaatatcatctttggtgtttcctatgatgaatatagataccgcggttctatctagttacgcgttaaaccaactagaa

SEQ ID NO: 3290 - RNA, 197 nt, synthetic construct
  source 1..197: mol_type = other RNA
gtctgtatctatattcatcatgtttaagagcggggaaatccgcaagtttaaataaggctagtccgttatcagcgtgaaaacgcggcaccgagtcggtgctatgcctggcaccattaaagaaaatatcatctttggtgtctcctacgatgaatatagataccgcggttctatctagttacgcgttaaaccaactagaa

SEQ ID NO: 3291 - RNA, 197 nt, synthetic construct
  source 1..197: mol_type = other RNA
gtctgtatctatattcatcatgtttaagagcggggaaatccgcaagtttaaataaggctagtccgttatcagcgtgaaaacgcggcaccgagtcggtgctatgcctgggaccattaaagaaaatatcatctttggtgtctcctatgatgaatatagataccgcggttctatctagttacgcgttaaaccaactagaa

SEQ ID NO: 3292 - RNA, 197 nt, synthetic construct
  source 1..197: mol_type = other RNA
gtctgtatctatattcatcatgtttaagagcggggaaatccgcaagtttaaataaggctagtccgttatcagcgtgaaaacgcggcaccgagtcggtgctatgcctgggaccattaaagaaaatatcatctttggtgtttcctacgatgaatatagataccgcggttctatctagttacgcgttaaaccaactagaa

SEQ ID NO: 3293 - RNA, 197 nt, synthetic construct
  source 1..197: mol_type = other RNA
gtctgtatctatattcatcatgtttaagagcggggaaatccgcaagtttaaataaggctagtccgttatcagcgtgaaaacgcggcaccgagtcggtgctatgcctggcaccattaaagagaatatcatctttggtgtctcctatgatgaatatagataccgcggttctatctagttacgcgttaaaccaactagaa

SEQ ID NO: 3294 - RNA, 197 nt, synthetic construct
  source 1..197: mol_type = other RNA
gtctgtatctatattcatcatgtttaagagcggggaaatccgcaagtttaaataaggctagtccgttatcagcgtgaaaacgcggcaccgagtcggtgctatgcctggcaccatcaaagaaaatatcatctttggtgtctcctatgatgaatatagataccgcggttctatctagttacgcgttaaaccaactagaa

SEQ ID NO: 3295 - RNA, 197 nt, synthetic construct
  source 1..197: mol_type = other RNA
gtctgtatctatattcatcatgtttaagagcggggaaatccgcaagtttaaataaggctagtccgttatcagcgtgaaaacgcggcaccgagtcggtgctatgcctggcaccattaaagagaatatcatctttggtgtttcctacgatgaatatagataccgcggttctatctagttacgcgttaaaccaactagaa

SEQ ID NO: 3296 - RNA, 197 nt, synthetic construct
  source 1..197: mol_type = other RNA
gtctgtatctatattcatcatgtttaagagcggggaaatccgcaagtttaaataaggctagtccgttatcagcgtgaaaacgcggcaccgagtcggtgctatgcctgggaccattaaagagaatatcatctttggtgtttcctatgatgaatatagataccgcggttctatctagttacgcgttaaaccaactagaa

SEQ ID NO: 3297 - RNA, 197 nt, synthetic construct
  source 1..197: mol_type = other RNA
gtctgtatctatattcatcatgtttaagagcggggaaatccgcaagtttaaataaggctagtccgttatcagcgtgaaaacgcggcaccgagtcggtgctatgcctggcaccatcaaagaaaatatcatctttggtgtttcctacgatgaatatagataccgcggttctatctagttacgcgttaaaccaactagaa

SEQ ID NO: 3298 - RNA, 197 nt, synthetic construct
  source 1..197: mol_type = other RNA
gtctgtatctatattcatcatgtttaagagcggggaaatccgcaagtttaaataaggctagtccgttatcagcgtgaaaacgcggcaccgagtcggtgctatgcctgggaccatcaaagaaaatatcatctttggtgtttcctatgatgaatatagataccgcggttctatctagttacgcgttaaaccaactagaa

SEQ ID NO: 3299 - RNA, 197 nt, synthetic construct
  source 1..197: mol_type = other RNA
gtctgtatctatattcatcatgtttaagagcggggaaatccgcaagtttaaataaggctagtccgttatcagcgtgaaaacgcggcaccgagtcggtgctatgccgggcaccattaaagaaaatatcatctttggtgtctcctatgatgaatatagataccgcggttctatctagttacgcgttaaaccaactagaa

SEQ ID NO: 3300 - RNA, 197 nt, synthetic construct
  source 1..197: mol_type = other RNA
gtctgtatctatattcatcatgtttaagagcggggaaatccgcaagtttaaataaggctagtccgttatcagcgtgaaaacgcggcaccgagtcggtgctatgccgggcaccattaaagaaaatatcatctttggtgtttcctacgatgaatatagataccgcggttctatctagttacgcgttaaaccaactagaa

SEQ ID NO: 3301 - RNA, 197 nt, synthetic construct
  source 1..197: mol_type = other RNA
gtctgtatctatattcatcatgtttaagagcggggaaatccgcaagtttaaataaggctagtccgttatcagcgtgaaaacgcggcaccgagtcggtgctatgccggggaccattaaagaaaatatcatctttggtgtttcctatgatgaatatagataccgcggttctatctagttacgcgttaaaccaactagaa

SEQ ID NO: 3302 - RNA, 197 nt, synthetic construct
  source 1..197: mol_type = other RNA
gtctgtatctatattcatcatgtttaagagcggggaaatccgcaagtttaaataaggctagtccgttatcagcgtgaaaacgcggcaccgagtcggtgctatgcctggcaccatcaaagagaatatcatctttggtgtttcctatgatgaatatagataccgcggttctatctagttacgcgttaaaccaactagaa

SEQ ID NO: 3303 - RNA, 197 nt, synthetic construct
  source 1..197: mol_type = other RNA
gtctgtatctatattcatcatgtttaagagcggggaaatccgcaagtttaaataaggctagtccgttatcagcgtgaaaacgcggcaccgagtcggtgctatgccgggcaccattaaagagaatatcatctttggtgtttcctatgatgaatatagataccgcggttctatctagttacgcgttaaaccaactagaa

SEQ ID NO: 3304 - RNA, 197 nt, synthetic construct
  source 1..197: mol_type = other RNA
gtctgtatctatattcatcatgtttaagagcggggaaatccgcaagtttaaataaggctagtccgttatcagcgtgaaaacgcggcaccgagtcggtgctatgccgggcaccatcaaagaaaatatcatctttggtgtttcctatgatgaatatagataccgcggttctatctagttacgcgttaaaccaactagaa

SEQ ID NO: 3305 - RNA, 182 nt, synthetic construct
  source 1..182: mol_type = other RNA
gtctgtatctatattcatcatgtttaagagcggggaaatccgcaagtttaaataaggctagtccgttatcagcgtgaaaacgcggcaccgagtcggtgcattaaagaaaacatcatctttggtgtttcatatgatgaatatagatcgcggttctatctagttacgcgttaaaccaactagaa

SEQ ID NO: 3306 - RNA, 182 nt, synthetic construct
  source 1..182: mol_type = other RNA
gtctgtatctatattcatcatgtttaagagcggggaaatccgcaagtttaaataaggctagtccgttatcagcgtgaaaacgcggcaccgagtcggtgcattaaagaaaacatcatctttggtgtttcgtatgatgaatatagatcgcggttctatctagttacgcgttaaaccaactagaa

SEQ ID NO: 3307 - RNA, 192 nt, synthetic construct
  source 1..192: mol_type = other RNA
gtctgtatctatattcatcatgtttaagagcggggaaatccgcaagtttaaataaggctagtccgttatcagcgtgaaaacgcggcaccgagtcggtgcgcctggcaccatcaaagaaaatatcatctttggtgtttcatacgatgaatatagatcgcggttctatctagttacgcgttaaaccaactagaa

SEQ ID NO: 3308 - RNA, 192 nt, synthetic construct
  source 1..192: mol_type = other RNA
gtctgtatctatattcatcatgtttaagagcggggaaatccgcaagtttaaataaggctagtccgttatcagcgtgaaaacgcggcaccgagtcggtgcgcctggcaccattaaagaaaatatcatctttggtgtctcgtacgatgaatatagatcgcggttctatctagttacgcgttaaaccaactagaa

SEQ ID NO: 3309 - RNA, 192 nt, synthetic construct
  source 1..192: mol_type = other RNA
gtctgtatctatattcatcatgtttaagagcggggaaatccgcaagtttaaataaggctagtccgttatcagcgtgaaaacgcggcaccgagtcggtgcgcctgggaccatcaaagaaaatatcatctttggtgtttcgtatgatgaatatagatcgcggttctatctagttacgcgttaaaccaactagaa

SEQ ID NO: 3310 - RNA, 192 nt, synthetic construct
  source 1..192: mol_type = other RNA
gtctgtatctatattcatcatgtttaagagcggggaaatccgcaagtttaaataaggctagtccgttatcagcgtgaaaacgcggcaccgagtcggtgcgcctgggaccattaaagaaaatatcatctttggtgtttcatatgatgaatatagatcgcggttctatctagttacgcgttaaaccaactagaa

SEQ ID NO: 3311 - RNA, 176 nt, synthetic construct
  source 1..176: mol_type = other RNA
gtctgtatctatattcatcatgtttaagagcggggaaatccgcaagtttaaataaggctagtccgttatcagcgtgaaaacgcggcaccgagtcggtgcaaacatcatctttggtgtttcctatgatgaatatagataccgcggttctatctagttacgcgttaaaccaactagaa

SEQ ID NO: 3312 - RNA, 176 nt, synthetic construct
  source 1..176: mol_type = other RNA
gtctgtatctatattcatcatgtttaagagcggggaaatccgcaagtttaaataaggctagtccgttatcagcgtgaaaacgcggcaccgagtcggtgcaaatataatctttggtgtttcctatgatgaatatagataccgcggttctatctagttacgcgttaaaccaactagaa

SEQ ID NO: 3313 - RNA, 176 nt, synthetic construct
  source 1..176: mol_type = other RNA
gtctgtatctatattcatcatgtttaagagcggggaaatccgcaagtttaaataaggctagtccgttatcagcgtgaaaacgcggcaccgagtcggtgcaaatatcatatttggtgtttcctatgatgaatatagataccgcggttctatctagttacgcgttaaaccaactagaa

SEQ ID NO: 3314 - RNA, 176 nt, synthetic construct
  source 1..176: mol_type = other RNA
gtctgtatctatattcatcatgtttaagagcggggaaatccgcaagtttaaataaggctagtccgttatcagcgtgaaaacgcggcaccgagtcggtgcaaatatcatcttcggtgtttcctatgatgaatatagataccgcggttctatctagttacgcgttaaaccaactagaa

SEQ ID NO: 3315 - RNA, 176 nt, synthetic construct
  source 1..176: mol_type = other RNA
gtctgtatctatattcatcatgtttaagagcggggaaatccgcaagtttaaataaggctagtccgttatcagcgtgaaaacgcggcaccgagtcggtgcaaatatcatctttggagtttcctatgatgaatatagataccgcggttctatctagttacgcgttaaaccaactagaa

SEQ ID NO: 3316 - RNA, 176 nt, synthetic construct
  source 1..176: mol_type = other RNA
gtctgtatctatattcatcatgtttaagagcggggaaatccgcaagtttaaataaggctagtccgttatcagcgtgaaaacgcggcaccgagtcggtgcaaatatcatctttggcgtttcctatgatgaatatagataccgcggttctatctagttacgcgttaaaccaactagaa

SEQ ID NO: 3317 - RNA, 176 nt, synthetic construct
  source 1..176: mol_type = other RNA
gtctgtatctatattcatcatgtttaagagcggggaaatccgcaagtttaaataaggctagtccgttatcagcgtgaaaacgcggcaccgagtcggtgcaaatatcatctttggggtttcctatgatgaatatagataccgcggttctatctagttacgcgttaaaccaactagaa

SEQ ID NO: 3318 - RNA, 176 nt, synthetic construct
  source 1..176: mol_type = other RNA
gtctgtatctatattcatcatgtttaagagcggggaaatccgcaagtttaaataaggctagtccgttatcagcgtgaaaacgcggcaccgagtcggtgcaaatatcatctttggtgtatcctatgatgaatatagataccgcggttctatctagttacgcgttaaaccaactagaa

SEQ ID NO: 3319 - RNA, 176 nt, synthetic construct
  source 1..176: mol_type = other RNA
gtctgtatctatattcatcatgtttaagagcggggaaatccgcaagtttaaataaggctagtccgttatcagcgtgaaaacgcggcaccgagtcggtgcaaatatcatctttggtgtctcctatgatgaatatagataccgcggttctatctagttacgcgttaaaccaactagaa

SEQ ID NO: 3320 - RNA, 176 nt, synthetic construct
  source 1..176: mol_type = other RNA
gtctgtatctatattcatcatgtttaagagcggggaaatccgcaagtttaaataaggctagtccgttatcagcgtgaaaacgcggcaccgagtcggtgcaaatatcatctttggtgtgtcctatgatgaatatagataccgcggttctatctagttacgcgttaaaccaactagaa

SEQ ID NO: 3321 - RNA, 176 nt, synthetic construct
  source 1..176: mol_type = other RNA
gtctgtatctatattcatcatgtttaagagcggggaaatccgcaagtttaaataaggctagtccgttatcagcgtgaaaacgcggcaccgagtcggtgcaaatatcatctttggtgtttcatatgatgaatatagataccgcggttctatctagttacgcgttaaaccaactagaa

SEQ ID NO: 3322 - RNA, 176 nt, synthetic construct
  source 1..176: mol_type = other RNA
gtctgtatctatattcatcatgtttaagagcggggaaatccgcaagtttaaataaggctagtccgttatcagcgtgaaaacgcggcaccgagtcggtgcaaatatcatctttggtgtttcctacgatgaatatagataccgcggttctatctagttacgcgttaaaccaactagaa

SEQ ID NO: 3323 - RNA, 176 nt, synthetic construct
  source 1..176: mol_type = other RNA
gtctgtatctatattcatcatgtttaagagcggggaaatccgcaagtttaaataaggctagtccgttatcagcgtgaaaacgcggcaccgagtcggtgcaaatatcatctttggtgtttcgtatgatgaatatagataccgcggttctatctagttacgcgttaaaccaactagaa

SEQ ID NO: 3324 - RNA, 176 nt, synthetic construct
  source 1..176: mol_type = other RNA
gtctgtatctatattcatcatgtttaagagcggggaaatccgcaagtttaaataaggctagtccgttatcagcgtgaaaacgcggcaccgagtcggtgcaaatatcatctttggtgtttcttatgatgaatatagataccgcggttctatctagttacgcgttaaaccaactagaa

SEQ ID NO: 3325 - RNA, 176 nt, synthetic construct
  source 1..176: mol_type = other RNA
gtctgtatctatattcatcatgtttaagagcggggaaatccgcaagtttaaataaggctagtccgttatcagcgtgaaaacgcggcaccgagtcggtgcaaatatcatttttggtgtttcctatgatgaatatagataccgcggttctatctagttacgcgttaaaccaactagaa

SEQ ID NO: 3326 - RNA, 176 nt, synthetic construct
  source 1..176: mol_type = other RNA
gtctgtatctatattcatcatgtttaagagcggggaaatccgcaagtttaaataaggctagtccgttatcagcgtgaaaacgcggcaccgagtcggtgcaaatattatctttggtgtttcctatgatgaatatagataccgcggttctatctagttacgcgttaaaccaactagaa

SEQ ID NO: 3327 - RNA, 176 nt, synthetic construct
  source 1..176: mol_type = other RNA
gtctgtatctatattcatcatgtttaagagcggggaaatccgcaagtttaaataaggctagtccgttatcagcgtgaaaacgcggcaccgagtcggtgcgaatatcatctttggtgtttcctatgatgaatatagataccgcggttctatctagttacgcgttaaaccaactagaa

SEQ ID NO: 3328 - RNA, 183 nt, synthetic construct
  source 1..183: mol_type = other RNA
gtctgtatctatattcatcatgtttaagagcggggaaatccgcaagtttaaataaggctagtccgttatcagcgtgaaaacgcggcaccgagtcggtgctaaaagaaaatatcatctttggtgtttcctatgatgaatatagataccgcggttctatctagttacgcgttaaaccaactagaa

SEQ ID NO: 3329 - RNA, 183 nt, synthetic construct
  source 1..183: mol_type = other RNA
gtctgtatctatattcatcatgtttaagagcggggaaatccgcaagtttaaataaggctagtccgttatcagcgtgaaaacgcggcaccgagtcggtgctcaaagaaaatatcatctttggtgtttcctatgatgaatatagataccgcggttctatctagttacgcgttaaaccaactagaa

SEQ ID NO: 3330 - RNA, 183 nt, synthetic construct
  source 1..183: mol_type = other RNA
gtctgtatctatattcatcatgtttaagagcggggaaatccgcaagtttaaataaggctagtccgttatcagcgtgaaaacgcggcaccgagtcggtgcttaaagaaaacatcatctttggtgtttcctatgatgaatatagataccgcggttctatctagttacgcgttaaaccaactagaa

SEQ ID NO: 3331 - RNA, 183 nt, synthetic construct
  source 1..183: mol_type = other RNA
gtctgtatctatattcatcatgtttaagagcggggaaatccgcaagtttaaataaggctagtccgttatcagcgtgaaaacgcggcaccgagtcggtgcttaaagaaaatataatctttggtgtttcctatgatgaatatagataccgcggttctatctagttacgcgttaaaccaactagaa

SEQ ID NO: 3332 - RNA, 183 nt, synthetic construct
  source 1..183: mol_type = other RNA
gtctgtatctatattcatcatgtttaagagcggggaaatccgcaagtttaaataaggctagtccgttatcagcgtgaaaacgcggcaccgagtcggtgcttaaagaaaatatcatatttggtgtttcctatgatgaatatagataccgcggttctatctagttacgcgttaaaccaactagaa

SEQ ID NO: 3333 - RNA, 183 nt, synthetic construct
  source 1..183: mol_type = other RNA
gtctgtatctatattcatcatgtttaagagcggggaaatccgcaagtttaaataaggctagtccgttatcagcgtgaaaacgcggcaccgagtcggtgcttaaagaaaatatcatcttcggtgtttcctatgatgaatatagataccgcggttctatctagttacgcgttaaaccaactagaa

SEQ ID NO: 3334 - RNA, 183 nt, synthetic construct
  source 1..183: mol_type = other RNA
gtctgtatctatattcatcatgtttaagagcggggaaatccgcaagtttaaataaggctagtccgttatcagcgtgaaaacgcggcaccgagtcggtgcttaaagaaaatatcatctttggagtttcctatgatgaatatagataccgcggttctatctagttacgcgttaaaccaactagaa

SEQ ID NO: 3335 - RNA, 183 nt, synthetic construct
  source 1..183: mol_type = other RNA
gtctgtatctatattcatcatgtttaagagcggggaaatccgcaagtttaaataaggctagtccgttatcagcgtgaaaacgcggcaccgagtcggtgcttaaagaaaatatcatctttggcgtttcctatgatgaatatagataccgcggttctatctagttacgcgttaaaccaactagaa

SEQ ID NO: 3336 - RNA, 183 nt, synthetic construct
  source 1..183: mol_type = other RNA
gtctgtatctatattcatcatgtttaagagcggggaaatccgcaagtttaaataaggctagtccgttatcagcgtgaaaacgcggcaccgagtcggtgcttaaagaaaatatcatctttggggtttcctatgatgaatatagataccgcggttctatctagttacgcgttaaaccaactagaa

SEQ ID NO: 3337 - RNA, 183 nt, synthetic construct
  source 1..183: mol_type = other RNA
gtctgtatctatattcatcatgtttaagagcggggaaatccgcaagtttaaataaggctagtccgttatcagcgtgaaaacgcggcaccgagtcggtgcttaaagaaaatatcatctttggtgtatcctatgatgaatatagataccgcggttctatctagttacgcgttaaaccaactagaa

SEQ ID NO: 3338 - RNA, 183 nt, synthetic construct
  source 1..183: mol_type = other RNA
gtctgtatctatattcatcatgtttaagagcggggaaatccgcaagtttaaataaggctagtccgttatcagcgtgaaaacgcggcaccgagtcggtgcttaaagaaaatatcatctttggtgtctcctatgatgaatatagataccgcggttctatctagttacgcgttaaaccaactagaa

SEQ ID NO: 3339 - RNA, 183 nt, synthetic construct
  source 1..183: mol_type = other RNA
gtctgtatctatattcatcatgtttaagagcggggaaatccgcaagtttaaataaggctagtccgttatcagcgtgaaaacgcggcaccgagtcggtgcttaaagaaaatatcatctttggtgtgtcctatgatgaatatagataccgcggttctatctagttacgcgttaaaccaactagaa

SEQ ID NO: 3340 - RNA, 183 nt, synthetic construct
  source 1..183: mol_type = other RNA
gtctgtatctatattcatcatgtttaagagcggggaaatccgcaagtttaaataaggctagtccgttatcagcgtgaaaacgcggcaccgagtcggtgcttaaagaaaatatcatctttggtgtttcatatgatgaatatagataccgcggttctatctagttacgcgttaaaccaactagaa

SEQ ID NO: 3341 - RNA, 183 nt, synthetic construct
  source 1..183: mol_type = other RNA
gtctgtatctatattcatcatgtttaagagcggggaaatccgcaagtttaaataaggctagtccgttatcagcgtgaaaacgcggcaccgagtcggtgcttaaagaaaatatcatctttggtgtttcctacgatgaatatagataccgcggttctatctagttacgcgttaaaccaactagaa

SEQ ID NO: 3342 - RNA, 183 nt, synthetic construct
  source 1..183: mol_type = other RNA
gtctgtatctatattcatcatgtttaagagcggggaaatccgcaagtttaaataaggctagtccgttatcagcgtgaaaacgcggcaccgagtcggtgcttaaagaaaatatcatctttggtgtttcgtatgatgaatatagataccgcggttctatctagttacgcgttaaaccaactagaa

SEQ ID NO: 3343 - RNA, 183 nt, synthetic construct
  source 1..183: mol_type = other RNA
gtctgtatctatattcatcatgtttaagagcggggaaatccgcaagtttaaataaggctagtccgttatcagcgtgaaaacgcggcaccgagtcggtgcttaaagaaaatatcatctttggtgtttcttatgatgaatatagataccgcggttctatctagttacgcgttaaaccaactagaa

SEQ ID NO: 3344 - RNA, 183 nt, synthetic construct
  source 1..183: mol_type = other RNA
gtctgtatctatattcatcatgtttaagagcggggaaatccgcaagtttaaataaggctagtccgttatcagcgtgaaaacgcggcaccgagtcggtgcttaaagaaaatatcatttttggtgtttcctatgatgaatatagataccgcggttctatctagttacgcgttaaaccaactagaa

SEQ ID NO: 3345 - RNA, 183 nt, synthetic construct
  source 1..183: mol_type = other RNA
gtctgtatctatattcatcatgtttaagagcggggaaatccgcaagtttaaataaggctagtccgttatcagcgtgaaaacgcggcaccgagtcggtgcttaaagaaaatattatctttggtgtttcctatgatgaatatagataccgcggttctatctagttacgcgttaaaccaactagaa

SEQ ID NO: 3346 - RNA, 183 nt, synthetic construct
  source 1..183: mol_type = other RNA
gtctgtatctatattcatcatgtttaagagcggggaaatccgcaagtttaaataaggctagtccgttatcagcgtgaaaacgcggcaccgagtcggtgcttaaagagaatatcatctttggtgtttcctatgatgaatatagataccgcggttctatctagttacgcgttaaaccaactagaa

SEQ ID NO: 3347 - RNA, 183 nt, synthetic construct
  source 1..183: mol_type = other RNA
gtctgtatctatattcatcatgtttaagagcggggaaatccgcaagtttaaataaggctagtccgttatcagcgtgaaaacgcggcaccgagtcggtgcttaaggaaaatatcatctttggtgtttcctatgatgaatatagataccgcggttctatctagttacgcgttaaaccaactagaa

SEQ ID NO: 3348 - RNA, 197 nt, synthetic construct
  source 1..197: mol_type = other RNA
gtctgtatctatattcatcatgtttaagagcggggaaatccgcaagtttaaataaggctagtccgttatcagcgtgaaaacgcggcaccgagtcggtgcaatgccaggaacaataaaggagaacattatattcggtgtgagttatgatgaatatagataccgcggttctatctagttacgcgttaaaccaactagaa

SEQ ID NO: 3349 - RNA, 197 nt, synthetic construct
  source 1..197: mol_type = other RNA
gtctgtatctatattcatcatgtttaagagcggggaaatccgcaagtttaaataaggctagtccgttatcagcgtgaaaacgcggcaccgagtcggtgccatgccaggaacaataaaggagaacattatattcggtgtgagttatgatgaatatagataccgcggttctatctagttacgcgttaaaccaactagaa

SEQ ID NO: 3350 - RNA, 197 nt, synthetic construct
  source 1..197: mol_type = other RNA
gtctgtatctatattcatcatgtttaagagcggggaaatccgcaagtttaaataaggctagtccgttatcagcgtgaaaacgcggcaccgagtcggtgctatgccaggcaccattaaagaaaatatcatctttggtgtttcctatgatgaatatagataccgcggttctatctagttacgcgttaaaccaactagaa

SEQ ID NO: 3351 - RNA, 197 nt, synthetic construct
  source 1..197: mol_type = other RNA
gtctgtatctatattcatcatgtttaagagcggggaaatccgcaagtttaaataaggctagtccgttatcagcgtgaaaacgcggcaccgagtcggtgctatgcccggcaccattaaagaaaatatcatctttggtgtttcctatgatgaatatagataccgcggttctatctagttacgcgttaaaccaactagaa

SEQ ID NO: 3352 - RNA, 197 nt, synthetic construct
  source 1..197: mol_type = other RNA
gtctgtatctatattcatcatgtttaagagcggggaaatccgcaagtttaaataaggctagtccgttatcagcgtgaaaacgcggcaccgagtcggtgctatgccgggcaccattaaagaaaatatcatctttggtgtttcctatgatgaatatagataccgcggttctatctagttacgcgttaaaccaactagaa

SEQ ID NO: 3353 - RNA, 197 nt, synthetic construct
  source 1..197: mol_type = other RNA
gtctgtatctatattcatcatgtttaagagcggggaaatccgcaagtttaaataaggctagtccgttatcagcgtgaaaacgcggcaccgagtcggtgctatgcctggaaccattaaagaaaatatcatctttggtgtttcctatgatgaatatagataccgcggttctatctagttacgcgttaaaccaactagaa

SEQ ID NO: 3354 - RNA, 197 nt, synthetic construct
  source 1..197: mol_type = other RNA
gtctgtatctatattcatcatgtttaagagcggggaaatccgcaagtttaaataaggctagtccgttatcagcgtgaaaacgcggcaccgagtcggtgctatgcctggcacaattaaagaaaatatcatctttggtgtttcctatgatgaatatagataccgcggttctatctagttacgcgttaaaccaactagaa

SEQ ID NO: 3355 - RNA, 197 nt, synthetic construct
  source 1..197: mol_type = other RNA
gtctgtatctatattcatcatgtttaagagcggggaaatccgcaagtttaaataaggctagtccgttatcagcgtgaaaacgcggcaccgagtcggtgctatgcctggcaccataaaagaaaatatcatctttggtgtttcctatgatgaatatagataccgcggttctatctagttacgcgttaaaccaactagaa

SEQ ID NO: 3356 - RNA, 197 nt, synthetic construct
  source 1..197: mol_type = other RNA
gtctgtatctatattcatcatgtttaagagcggggaaatccgcaagtttaaataaggctagtccgttatcagcgtgaaaacgcggcaccgagtcggtgctatgcctggcaccatcaaagaaaatatcatctttggtgtttcctatgatgaatatagataccgcggttctatctagttacgcgttaaaccaactagaa

SEQ ID NO: 3357 - RNA, 197 nt, synthetic construct
  source 1..197: mol_type = other RNA
gtctgtatctatattcatcatgtttaagagcggggaaatccgcaagtttaaataaggctagtccgttatcagcgtgaaaacgcggcaccgagtcggtgctatgcctggcaccattaaagaaaacatcatctttggtgtttcctatgatgaatatagataccgcggttctatctagttacgcgttaaaccaactagaa

SEQ ID NO: 3358 - RNA, 197 nt, synthetic construct
  source 1..197: mol_type = other RNA
gtctgtatctatattcatcatgtttaagagcggggaaatccgcaagtttaaataaggctagtccgttatcagcgtgaaaacgcggcaccgagtcggtgctatgcctggcaccattaaagaaaatataatctttggtgtttcctatgatgaatatagataccgcggttctatctagttacgcgttaaaccaactagaa

SEQ ID NO: 3359 - RNA, 197 nt, synthetic construct
  source 1..197: mol_type = other RNA
gtctgtatctatattcatcatgtttaagagcggggaaatccgcaagtttaaataaggctagtccgttatcagcgtgaaaacgcggcaccgagtcggtgctatgcctggcaccattaaagaaaatatcatatttggtgtttcctatgatgaatatagataccgcggttctatctagttacgcgttaaaccaactagaa

SEQ ID NO: 3360 - RNA, 197 nt, synthetic construct
  source 1..197: mol_type = other RNA
gtctgtatctatattcatcatgtttaagagcggggaaatccgcaagtttaaataaggctagtccgttatcagcgtgaaaacgcggcaccgagtcggtgctatgcctggcaccattaaagaaaatatcatcttcggtgtttcctatgatgaatatagataccgcggttctatctagttacgcgttaaaccaactagaa

SEQ ID NO: 3361 - RNA, 197 nt, synthetic construct
  source 1..197: mol_type = other RNA
gtctgtatctatattcatcatgtttaagagcggggaaatccgcaagtttaaataaggctagtccgttatcagcgtgaaaacgcggcaccgagtcggtgctatgcctggcaccattaaagaaaatatcatctttggagtttcctatgatgaatatagataccgcggttctatctagttacgcgttaaaccaactagaa

SEQ ID NO: 3362 - RNA, 197 nt, synthetic construct
  source 1..197: mol_type = other RNA
gtctgtatctatattcatcatgtttaagagcggggaaatccgcaagtttaaataaggctagtccgttatcagcgtgaaaacgcggcaccgagtcggtgctatgcctggcaccattaaagaaaatatcatctttggcgtttcctatgatgaatatagataccgcggttctatctagttacgcgttaaaccaactagaa

SEQ ID NO: 3363 - RNA, 197 nt, synthetic construct
  source 1..197: mol_type = other RNA
gtctgtatctatattcatcatgtttaagagcggggaaatccgcaagtttaaataaggctagtccgttatcagcgtgaaaacgcggcaccgagtcggtgctatgcctggcaccattaaagaaaatatcatctttggggtttcctatgatgaatatagataccgcggttctatctagttacgcgttaaaccaactagaa

SEQ ID NO: 3364 - RNA, 197 nt, synthetic construct
  source 1..197: mol_type = other RNA
gtctgtatctatattcatcatgtttaagagcggggaaatccgcaagtttaaataaggctagtccgttatcagcgtgaaaacgcggcaccgagtcggtgctatgcctggcaccattaaagaaaatatcatctttggtgtatcctatgatgaatatagataccgcggttctatctagttacgcgttaaaccaactagaa

SEQ ID NO: 3365 - RNA, 197 nt, synthetic construct
  source 1..197: mol_type = other RNA
gtctgtatctatattcatcatgtttaagagcggggaaatccgcaagtttaaataaggctagtccgttatcagcgtgaaaacgcggcaccgagtcggtgctatgcctggcaccattaaagaaaatatcatctttggtgtctcctatgatgaatatagataccgcggttctatctagttacgcgttaaaccaactagaa

SEQ ID NO: 3366 - RNA, 197 nt, synthetic construct
  source 1..197: mol_type = other RNA
gtctgtatctatattcatcatgtttaagagcggggaaatccgcaagtttaaataaggctagtccgttatcagcgtgaaaacgcggcaccgagtcggtgctatgcctggcaccattaaagaaaatatcatctttggtgtgtcctatgatgaatatagataccgcggttctatctagttacgcgttaaaccaactagaa

SEQ ID NO: 3367 - RNA, 197 nt, synthetic construct
  source 1..197: mol_type = other RNA
gtctgtatctatattcatcatgtttaagagcggggaaatccgcaagtttaaataaggctagtccgttatcagcgtgaaaacgcggcaccgagtcggtgctatgcctggcaccattaaagaaaatatcatctttggtgtttcatatgatgaatatagataccgcggttctatctagttacgcgttaaaccaactagaa

SEQ ID NO: 3368 - RNA, 197 nt, synthetic construct
  source 1..197: mol_type = other RNA
gtctgtatctatattcatcatgtttaagagcggggaaatccgcaagtttaaataaggctagtccgttatcagcgtgaaaacgcggcaccgagtcggtgctatgcctggcaccattaaagaaaatatcatctttggtgtttcctacgatgaatatagataccgcggttctatctagttacgcgttaaaccaactagaa

SEQ ID NO: 3369 - RNA, 197 nt, synthetic construct
  source 1..197: mol_type = other RNA
gtctgtatctatattcatcatgtttaagagcggggaaatccgcaagtttaaataaggctagtccgttatcagcgtgaaaacgcggcaccgagtcggtgctatgcctggcaccattaaagaaaatatcatctttggtgtttcgtatgatgaatatagataccgcggttctatctagttacgcgttaaaccaactagaa

SEQ ID NO: 3370 - RNA, 197 nt, synthetic construct
  source 1..197: mol_type = other RNA
gtctgtatctatattcatcatgtttaagagcggggaaatccgcaagtttaaataaggctagtccgttatcagcgtgaaaacgcggcaccgagtcggtgctatgcctggcaccattaaagaaaatatcatctttggtgtttcttatgatgaatatagataccgcggttctatctagttacgcgttaaaccaactagaa

SEQ ID NO: 3371 - RNA, 197 nt, synthetic construct
  source 1..197: mol_type = other RNA
gtctgtatctatattcatcatgtttaagagcggggaaatccgcaagtttaaataaggctagtccgttatcagcgtgaaaacgcggcaccgagtcggtgctatgcctggcaccattaaagaaaatatcatttttggtgtttcctatgatgaatatagataccgcggttctatctagttacgcgttaaaccaactagaa

SEQ ID NO: 3372 - RNA, 197 nt, synthetic construct
  source 1..197: mol_type = other RNA
gtctgtatctatattcatcatgtttaagagcggggaaatccgcaagtttaaataaggctagtccgttatcagcgtgaaaacgcggcaccgagtcggtgctatgcctggcaccattaaagaaaatattatctttggtgtttcctatgatgaatatagataccgcggttctatctagttacgcgttaaaccaactagaa

SEQ ID NO: 3373 - RNA, 197 nt, synthetic construct
  source 1..197: mol_type = other RNA
gtctgtatctatattcatcatgtttaagagcggggaaatccgcaagtttaaataaggctagtccgttatcagcgtgaaaacgcggcaccgagtcggtgctatgcctggcaccattaaagagaatatcatctttggtgtttcctatgatgaatatagataccgcggttctatctagttacgcgttaaaccaactagaa

SEQ ID NO: 3374 - RNA, 197 nt, synthetic construct
  source 1..197: mol_type = other RNA
gtctgtatctatattcatcatgtttaagagcggggaaatccgcaagtttaaataaggctagtccgttatcagcgtgaaaacgcggcaccgagtcggtgctatgcctggcaccattaaggaaaatatcatctttggtgtttcctatgatgaatatagataccgcggttctatctagttacgcgttaaaccaactagaa

SEQ ID NO: 3375 - RNA, 197 nt, synthetic construct
  source 1..197: mol_type = other RNA
gtctgtatctatattcatcatgtttaagagcggggaaatccgcaagtttaaataaggctagtccgttatcagcgtgaaaacgcggcaccgagtcggtgctatgcctggcacgattaaagaaaatatcatctttggtgtttcctatgatgaatatagataccgcggttctatctagttacgcgttaaaccaactagaa

SEQ ID NO: 3376 - RNA, 197 nt, synthetic construct
  source 1..197: mol_type = other RNA
gtctgtatctatattcatcatgtttaagagcggggaaatccgcaagtttaaataaggctagtccgttatcagcgtgaaaacgcggcaccgagtcggtgctatgcctggcactattaaagaaaatatcatctttggtgtttcctatgatgaatatagataccgcggttctatctagttacgcgttaaaccaactagaa

SEQ ID NO: 3377 - RNA, 197 nt, synthetic construct
  source 1..197: mol_type = other RNA
gtctgtatctatattcatcatgtttaagagcggggaaatccgcaagtttaaataaggctagtccgttatcagcgtgaaaacgcggcaccgagtcggtgctatgcctgggaccattaaagaaaatatcatctttggtgtttcctatgatgaatatagataccgcggttctatctagttacgcgttaaaccaactagaa

SEQ ID NO: 3378 - RNA, 197 nt, synthetic construct
  source 1..197: mol_type = other RNA
gtctgtatctatattcatcatgtttaagagcggggaaatccgcaagtttaaataaggctagtccgttatcagcgtgaaaacgcggcaccgagtcggtgctatgcctggtaccattaaagaaaatatcatctttggtgtttcctatgatgaatatagataccgcggttctatctagttacgcgttaaaccaactagaa

SEQ ID NO: 3379 - RNA, 169 nt, synthetic construct
  source 1..169: mol_type = other RNA
gttcatcataggaaacaccaagtttaagagcggggaaatccgcaagtttaaataaggctagtccgttatcagcgtgaaaacgcggcaccgagtcggtgctaaaagaaaatatcatctttggtgtttcctatgcgcggttctatctagttacgcgttaaaccaactagaa

SEQ ID NO: 3380 - RNA, 169 nt, synthetic construct
  source 1..169: mol_type = other RNA
gttcatcataggaaacaccaagtttaagagcggggaaatccgcaagtttaaataaggctagtccgttatcagcgtgaaaacgcggcaccgagtcggtgctcaaagaaaatatcatctttggtgtttcctatgcgcggttctatctagttacgcgttaaaccaactagaa

SEQ ID NO: 3381 - RNA, 169 nt, synthetic construct
  source 1..169: mol_type = other RNA
gttcatcataggaaacaccaagtttaagagcggggaaatccgcaagtttaaataaggctagtccgttatcagcgtgaaaacgcggcaccgagtcggtgcttaaagaaaacatcatctttggtgtttcctatgcgcggttctatctagttacgcgttaaaccaactagaa

SEQ ID NO: 3382 - RNA, 169 nt, synthetic construct
  source 1..169: mol_type = other RNA
gttcatcataggaaacaccaagtttaagagcggggaaatccgcaagtttaaataaggctagtccgttatcagcgtgaaaacgcggcaccgagtcggtgcttaaagaaaatataatctttggtgtttcctatgcgcggttctatctagttacgcgttaaaccaactagaa

SEQ ID NO: 3383 - RNA, 169 nt, synthetic construct
  source 1..169: mol_type = other RNA
gttcatcataggaaacaccaagtttaagagcggggaaatccgcaagtttaaataaggctagtccgttatcagcgtgaaaacgcggcaccgagtcggtgcttaaagaaaatatcatatttggtgtttcctatgcgcggttctatctagttacgcgttaaaccaactagaa

SEQ ID NO: 3384 - RNA, 169 nt, synthetic construct
  source 1..169: mol_type = other RNA
gttcatcataggaaacaccaagtttaagagcggggaaatccgcaagtttaaataaggctagtccgttatcagcgtgaaaacgcggcaccgagtcggtgcttaaagaaaatatcatcttcggtgtttcctatgcgcggttctatctagttacgcgttaaaccaactagaa

SEQ ID NO: 3385 - RNA, 169 nt, synthetic construct
  source 1..169: mol_type = other RNA
gttcatcataggaaacaccaagtttaagagcggggaaatccgcaagtttaaataaggctagtccgttatcagcgtgaaaacgcggcaccgagtcggtgcttaaagaaaatatcatttttggtgtttcctatgcgcggttctatctagttacgcgttaaaccaactagaa

SEQ ID NO: 3386 - RNA, 169 nt, synthetic construct
  source 1..169: mol_type = other RNA
gttcatcataggaaacaccaagtttaagagcggggaaatccgcaagtttaaataaggctagtccgttatcagcgtgaaaacgcggcaccgagtcggtgcttaaagaaaatattatctttggtgtttcctatgcgcggttctatctagttacgcgttaaaccaactagaa

SEQ ID NO: 3387 - RNA, 169 nt, synthetic construct
  source 1..169: mol_type = other RNA
gttcatcataggaaacaccaagtttaagagcggggaaatccgcaagtttaaataaggctagtccgttatcagcgtgaaaacgcggcaccgagtcggtgcttaaagagaatatcatctttggtgtttcctatgcgcggttctatctagttacgcgttaaaccaactagaa

SEQ ID NO: 3388 - RNA, 169 nt, synthetic construct
  source 1..169: mol_type = other RNA
gttcatcataggaaacaccaagtttaagagcggggaaatccgcaagtttaaataaggctagtccgttatcagcgtgaaaacgcggcaccgagtcggtgcttaaggaaaatatcatctttggtgtttcctatgcgcggttctatctagttacgcgttaaaccaactagaa

SEQ ID NO: 3389 - RNA, 172 nt, synthetic construct
  source 1..172: mol_type = other RNA
gttcatcataggaaacaccaagtttaagagcggggaaatccgcaagtttaaataaggctagtccgttatcagcgtgaaaacgcggcaccgagtcggtgctaaaagaaaatatcatctttggtgtttcctatgatgcgcggttctatctagttacgcgttaaaccaactagaa

SEQ ID NO: 3390 - RNA, 172 nt, synthetic construct
  source 1..172: mol_type = other RNA
gttcatcataggaaacaccaagtttaagagcggggaaatccgcaagtttaaataaggctagtccgttatcagcgtgaaaacgcggcaccgagtcggtgctcaaagaaaatatcatctttggtgtttcctatgatgcgcggttctatctagttacgcgttaaaccaactagaa

SEQ ID NO: 3391 - RNA, 172 nt, synthetic construct
  source 1..172: mol_type = other RNA
gttcatcataggaaacaccaagtttaagagcggggaaatccgcaagtttaaataaggctagtccgttatcagcgtgaaaacgcggcaccgagtcggtgcttaaagaaaacatcatctttggtgtttcctatgatgcgcggttctatctagttacgcgttaaaccaactagaa

SEQ ID NO: 3392 - RNA, 172 nt, synthetic construct
  source 1..172: mol_type = other RNA
gttcatcataggaaacaccaagtttaagagcggggaaatccgcaagtttaaataaggctagtccgttatcagcgtgaaaacgcggcaccgagtcggtgcttaaagaaaatataatctttggtgtttcctatgatgcgcggttctatctagttacgcgttaaaccaactagaa

SEQ ID NO: 3393 - RNA, 172 nt, synthetic construct
  source 1..172: mol_type = other RNA
gttcatcataggaaacaccaagtttaagagcggggaaatccgcaagtttaaataaggctagtccgttatcagcgtgaaaacgcggcaccgagtcggtgcttaaagaaaatatcatatttggtgtttcctatgatgcgcggttctatctagttacgcgttaaaccaactagaa

SEQ ID NO: 3394 - RNA, 172 nt, synthetic construct
  source 1..172: mol_type = other RNA
gttcatcataggaaacaccaagtttaagagcggggaaatccgcaagtttaaataaggctagtccgttatcagcgtgaaaacgcggcaccgagtcggtgcttaaagaaaatatcatcttcggtgtttcctatgatgcgcggttctatctagttacgcgttaaaccaactagaa

SEQ ID NO: 3395 - RNA, 172 nt, synthetic construct
  source 1..172: mol_type = other RNA
gttcatcataggaaacaccaagtttaagagcggggaaatccgcaagtttaaataaggctagtccgttatcagcgtgaaaacgcggcaccgagtcggtgcttaaagaaaatatcatttttggtgtttcctatgatgcgcggttctatctagttacgcgttaaaccaactagaa

SEQ ID NO: 3396 - RNA, 172 nt, synthetic construct
  source 1..172: mol_type = other RNA
gttcatcataggaaacaccaagtttaagagcggggaaatccgcaagtttaaataaggctagtccgttatcagcgtgaaaacgcggcaccgagtcggtgcttaaagaaaatattatctttggtgtttcctatgatgcgcggttctatctagttacgcgttaaaccaactagaa

SEQ ID NO: 3397 - RNA, 172 nt, synthetic construct
  source 1..172: mol_type = other RNA
gttcatcataggaaacaccaagtttaagagcggggaaatccgcaagtttaaataaggctagtccgttatcagcgtgaaaacgcggcaccgagtcggtgcttaaagagaatatcatctttggtgtttcctatgatgcgcggttctatctagttacgcgttaaaccaactagaa

SEQ ID NO: 3398 - RNA, 172 nt, synthetic construct
  source 1..172: mol_type = other RNA
gttcatcataggaaacaccaagtttaagagcggggaaatccgcaagtttaaataaggctagtccgttatcagcgtgaaaacgcggcaccgagtcggtgcttaaggaaaatatcatctttggtgtttcctatgatgcgcggttctatctagttacgcgttaaaccaactagaa

SEQ ID NO: 3399 - RNA, 166 nt, synthetic construct
  source 1..166: mol_type = other RNA
gttcatcataggaaacaccaagtttaagagcggggaaatccgcaagtttaaataaggctagtccgttatcagcgtgaaaacgcggcaccgagtcggtgcaagaaaacatcatctttggtgtttcctatgcgcggttctatctagttacgcgttaaaccaactagaa

SEQ ID NO: 3400 - RNA, 166 nt, synthetic construct
  source 1..166: mol_type = other RNA
gttcatcataggaaacaccaagtttaagagcggggaaatccgcaagtttaaataaggctagtccgttatcagcgtgaaaacgcggcaccgagtcggtgcaagaaaatataatctttggtgtttcctatgcgcggttctatctagttacgcgttaaaccaactagaa

SEQ ID NO: 3401 - RNA, 166 nt, synthetic construct
  source 1..166: mol_type = other RNA
gttcatcataggaaacaccaagtttaagagcggggaaatccgcaagtttaaataaggctagtccgttatcagcgtgaaaacgcggcaccgagtcggtgcaagaaaatatcatatttggtgtttcctatgcgcggttctatctagttacgcgttaaaccaactagaa

SEQ ID NO: 3402 - RNA, 166 nt, synthetic construct
  source 1..166: mol_type = other RNA
gttcatcataggaaacaccaagtttaagagcggggaaatccgcaagtttaaataaggctagtccgttatcagcgtgaaaacgcggcaccgagtcggtgcaagaaaatatcatcttcggtgtttcctatgcgcggttctatctagttacgcgttaaaccaactagaa

SEQ ID NO: 3403 - RNA, 166 nt, synthetic construct
  source 1..166: mol_type = other RNA
gttcatcataggaaacaccaagtttaagagcggggaaatccgcaagtttaaataaggctagtccgttatcagcgtgaaaacgcggcaccgagtcggtgcaagaaaatatcatttttggtgtttcctatgcgcggttctatctagttacgcgttaaaccaactagaa

SEQ ID NO: 3404 - RNA, 166 nt, synthetic construct
  source 1..166: mol_type = other RNA
gttcatcataggaaacaccaagtttaagagcggggaaatccgcaagtttaaataaggctagtccgttatcagcgtgaaaacgcggcaccgagtcggtgcaagaaaatattatctttggtgtttcctatgcgcggttctatctagttacgcgttaaaccaactagaa

SEQ ID NO: 3405 - RNA, 166 nt, synthetic construct
  source 1..166: mol_type = other RNA
gttcatcataggaaacaccaagtttaagagcggggaaatccgcaagtttaaataaggctagtccgttatcagcgtgaaaacgcggcaccgagtcggtgcaagagaatatcatctttggtgtttcctatgcgcggttctatctagttacgcgttaaaccaactagaa

SEQ ID NO: 3406 - RNA, 166 nt, synthetic construct
  source 1..166: mol_type = other RNA
gttcatcataggaaacaccaagtttaagagcggggaaatccgcaagtttaaataaggctagtccgttatcagcgtgaaaacgcggcaccgagtcggtgcaggaaaatatcatctttggtgtttcctatgcgcggttctatctagttacgcgttaaaccaactagaa

SEQ ID NO: 3407 - RNA, 170 nt, synthetic construct
  source 1..170: mol_type = other RNA
gttcatcataggaaacaccaagtttaagagcggggaaatccgcaagtttaaataaggctagtccgttatcagcgtgaaaacgcggcaccgagtcggtgcataaaagaaaatatcatctttggtgtttcctatgcgcggttctatctagttacgcgttaaaccaactagaa

SEQ ID NO: 3408 - RNA, 170 nt, synthetic construct
  source 1..170: mol_type = other RNA
gttcatcataggaaacaccaagtttaagagcggggaaatccgcaagtttaaataaggctagtccgttatcagcgtgaaaacgcggcaccgagtcggtgcatcaaagaaaatatcatctttggtgtttcctatgcgcggttctatctagttacgcgttaaaccaactagaa

SEQ ID NO: 3409 - RNA, 170 nt, synthetic construct
  source 1..170: mol_type = other RNA
gttcatcataggaaacaccaagtttaagagcggggaaatccgcaagtttaaataaggctagtccgttatcagcgtgaaaacgcggcaccgagtcggtgcattaaagaaaacatcatctttggtgtttcctatgcgcggttctatctagttacgcgttaaaccaactagaa

SEQ ID NO: 3410 - RNA, 170 nt, synthetic construct
  source 1..170: mol_type = other RNA
gttcatcataggaaacaccaagtttaagagcggggaaatccgcaagtttaaataaggctagtccgttatcagcgtgaaaacgcggcaccgagtcggtgcattaaagaaaatataatctttggtgtttcctatgcgcggttctatctagttacgcgttaaaccaactagaa

SEQ ID NO: 3411 - RNA, 170 nt, synthetic construct
  source 1..170: mol_type = other RNA
gttcatcataggaaacaccaagtttaagagcggggaaatccgcaagtttaaataaggctagtccgttatcagcgtgaaaacgcggcaccgagtcggtgcattaaagaaaatatcatatttggtgtttcctatgcgcggttctatctagttacgcgttaaaccaactagaa

SEQ ID NO: 3412 - RNA, 170 nt, synthetic construct
  source 1..170: mol_type = other RNA
gttcatcataggaaacaccaagtttaagagcggggaaatccgcaagtttaaataaggctagtccgttatcagcgtgaaaacgcggcaccgagtcggtgcattaaagaaaatatcatcttcggtgtttcctatgcgcggttctatctagttacgcgttaaaccaactagaa

SEQ ID NO: 3413 - RNA, 170 nt, synthetic construct
  source 1..170: mol_type = other RNA
gttcatcataggaaacaccaagtttaagagcggggaaatccgcaagtttaaataaggctagtccgttatcagcgtgaaaacgcggcaccgagtcggtgcattaaagaaaatatcatttttggtgtttcctatgcgcggttctatctagttacgcgttaaaccaactagaa

SEQ ID NO: 3414 - RNA, 170 nt, synthetic construct
  source 1..170: mol_type = other RNA
gttcatcataggaaacaccaagtttaagagcggggaaatccgcaagtttaaataaggctagtccgttatcagcgtgaaaacgcggcaccgagtcggtgcattaaagaaaatattatctttggtgtttcctatgcgcggttctatctagttacgcgttaaaccaactagaa

SEQ ID NO: 3415 - RNA, 170 nt, synthetic construct
  source 1..170: mol_type = other RNA
gttcatcataggaaacaccaagtttaagagcggggaaatccgcaagtttaaataaggctagtccgttatcagcgtgaaaacgcggcaccgagtcggtgcattaaagagaatatcatctttggtgtttcctatgcgcggttctatctagttacgcgttaaaccaactagaa

SEQ ID NO: 3416 - RNA, 170 nt, synthetic construct
  source 1..170: mol_type = other RNA
gttcatcataggaaacaccaagtttaagagcggggaaatccgcaagtttaaataaggctagtccgttatcagcgtgaaaacgcggcaccgagtcggtgcattaaggaaaatatcatctttggtgtttcctatgcgcggttctatctagttacgcgttaaaccaactagaa

SEQ ID NO: 3417 - RNA, 169 nt, synthetic construct
  source 1..169: mol_type = other RNA
gttcatcataggaaacaccaagtttaagagcggggaaatccgcaagtttaaataaggctagtccgttatcagcgtgaaaacgcggcaccgagtcggtgcaaagaaaacataatctttggtgtttcctatgatcgcggttctatctagttacgcgttaaaccaactagaa

SEQ ID NO: 3418 - RNA, 169 nt, synthetic construct
  source 1..169: mol_type = other RNA
gttcatcataggaaacaccaagtttaagagcggggaaatccgcaagtttaaataaggctagtccgttatcagcgtgaaaacgcggcaccgagtcggtgcaaagaaaacatcatatttggtgtttcctatgatcgcggttctatctagttacgcgttaaaccaactagaa

SEQ ID NO: 3419 - RNA, 169 nt, synthetic construct
  source 1..169: mol_type = other RNA
gttcatcataggaaacaccaagtttaagagcggggaaatccgcaagtttaaataaggctagtccgttatcagcgtgaaaacgcggcaccgagtcggtgcaaagaaaacatcatcttcggtgtttcctatgatcgcggttctatctagttacgcgttaaaccaactagaa

SEQ ID NO: 3420 - RNA, 169 nt, synthetic construct
  source 1..169: mol_type = other RNA
gttcatcataggaaacaccaagtttaagagcggggaaatccgcaagtttaaataaggctagtccgttatcagcgtgaaaacgcggcaccgagtcggtgcaaagaaaacatcatctttggtgtttcctatgatcgcggttctatctagttacgcgttaaaccaactagaa

SEQ ID NO: 3421 - RNA, 169 nt, synthetic construct
  source 1..169: mol_type = other RNA
gttcatcataggaaacaccaagtttaagagcggggaaatccgcaagtttaaataaggctagtccgttatcagcgtgaaaacgcggcaccgagtcggtgcaaagaaaacatcatttttggtgtttcctatgatcgcggttctatctagttacgcgttaaaccaactagaa

SEQ ID NO: 3422 - RNA, 169 nt, synthetic construct
  source 1..169: mol_type = other RNA
gttcatcataggaaacaccaagtttaagagcggggaaatccgcaagtttaaataaggctagtccgttatcagcgtgaaaacgcggcaccgagtcggtgcaaagaaaacattatctttggtgtttcctatgatcgcggttctatctagttacgcgttaaaccaactagaa

SEQ ID NO: 3423 - RNA, 169 nt, synthetic construct
  source 1..169: mol_type = other RNA
gttcatcataggaaacaccaagtttaagagcggggaaatccgcaagtttaaataaggctagtccgttatcagcgtgaaaacgcggcaccgagtcggtgcaaagaaaatataatatttggtgtttcctatgatcgcggttctatctagttacgcgttaaaccaactagaa

SEQ ID NO: 3424 - RNA, 169 nt, synthetic construct
  source 1..169: mol_type = other RNA
gttcatcataggaaacaccaagtttaagagcggggaaatccgcaagtttaaataaggctagtccgttatcagcgtgaaaacgcggcaccgagtcggtgcaaagaaaatataatcttcggtgtttcctatgatcgcggttctatctagttacgcgttaaaccaactagaa

SEQ ID NO: 3425 - RNA, 169 nt, synthetic construct
  source 1..169: mol_type = other RNA
gttcatcataggaaacaccaagtttaagagcggggaaatccgcaagtttaaataaggctagtccgttatcagcgtgaaaacgcggcaccgagtcggtgcaaagaaaatataatctttggtgtttcctatgatcgcggttctatctagttacgcgttaaaccaactagaa

SEQ ID NO: 3426 - RNA, 169 nt, synthetic construct
  source 1..169: mol_type = other RNA
gttcatcataggaaacaccaagtttaagagcggggaaatccgcaagtttaaataaggctagtccgttatcagcgtgaaaacgcggcaccgagtcggtgcaaagaaaatataatttttggtgtttcctatgatcgcggttctatctagttacgcgttaaaccaactagaa

SEQ ID NO: 3427 - RNA, 169 nt, synthetic construct
  source 1..169: mol_type = other RNA
gttcatcataggaaacaccaagtttaagagcggggaaatccgcaagtttaaataaggctagtccgttatcagcgtgaaaacgcggcaccgagtcggtgcaaagaaaatatcatattcggtgtttcctatgatcgcggttctatctagttacgcgttaaaccaactagaa

SEQ ID NO: 3428 - RNA, 169 nt, synthetic construct
  source 1..169: mol_type = other RNA
gttcatcataggaaacaccaagtttaagagcggggaaatccgcaagtttaaataaggctagtccgttatcagcgtgaaaacgcggcaccgagtcggtgcaaagaaaatatcatatttggtgtttcctatgatcgcggttctatctagttacgcgttaaaccaactagaa

SEQ ID NO: 3429 - RNA, 169 nt, synthetic construct
  source 1..169: mol_type = other RNA
gttcatcataggaaacaccaagtttaagagcggggaaatccgcaagtttaaataaggctagtccgttatcagcgtgaaaacgcggcaccgagtcggtgcaaagaaaatatcatcttcggtgtttcctatgatcgcggttctatctagttacgcgttaaaccaactagaa

SEQ ID NO: 3430 - RNA, 169 nt, synthetic construct
  source 1..169: mol_type = other RNA
gttcatcataggaaacaccaagtttaagagcggggaaatccgcaagtttaaataaggctagtccgttatcagcgtgaaaacgcggcaccgagtcggtgcaaagaaaatatcattttcggtgtttcctatgatcgcggttctatctagttacgcgttaaaccaactagaa

SEQ ID NO: 3431 - RNA, 169 nt, synthetic construct
  source 1..169: mol_type = other RNA
gttcatcataggaaacaccaagtttaagagcggggaaatccgcaagtttaaataaggctagtccgttatcagcgtgaaaacgcggcaccgagtcggtgcaaagaaaatatcatttttggtgtttcctatgatcgcggttctatctagttacgcgttaaaccaactagaa

SEQ ID NO: 3432 - RNA, 169 nt, synthetic construct
  source 1..169: mol_type = other RNA
gttcatcataggaaacaccaagtttaagagcggggaaatccgcaagtttaaataaggctagtccgttatcagcgtgaaaacgcggcaccgagtcggtgcaaagaaaatattatatttggtgtttcctatgatcgcggttctatctagttacgcgttaaaccaactagaa

SEQ ID NO: 3433 - RNA, 169 nt, synthetic construct
  source 1..169: mol_type = other RNA
gttcatcataggaaacaccaagtttaagagcggggaaatccgcaagtttaaataaggctagtccgttatcagcgtgaaaacgcggcaccgagtcggtgcaaagaaaatattatcttcggtgtttcctatgatcgcggttctatctagttacgcgttaaaccaactagaa

SEQ ID NO: 3434 - RNA, 169 nt, synthetic construct
  source 1..169: mol_type = other RNA
gttcatcataggaaacaccaagtttaagagcggggaaatccgcaagtttaaataaggctagtccgttatcagcgtgaaaacgcggcaccgagtcggtgcaaagaaaatattatctttggtgtttcctatgatcgcggttctatctagttacgcgttaaaccaactagaa

SEQ ID NO: 3435 - RNA, 169 nt, synthetic construct
  source 1..169: mol_type = other RNA
gttcatcataggaaacaccaagtttaagagcggggaaatccgcaagtttaaataaggctagtccgttatcagcgtgaaaacgcggcaccgagtcggtgcaaagaaaatattatttttggtgtttcctatgatcgcggttctatctagttacgcgttaaaccaactagaa

SEQ ID NO: 3436 - RNA, 169 nt, synthetic construct
  source 1..169: mol_type = other RNA
gttcatcataggaaacaccaagtttaagagcggggaaatccgcaagtttaaataaggctagtccgttatcagcgtgaaaacgcggcaccgagtcggtgcaaagagaacatcatctttggtgtttcctatgatcgcggttctatctagttacgcgttaaaccaactagaa

SEQ ID NO: 3437 - RNA, 169 nt, synthetic construct
  source 1..169: mol_type = other RNA
gttcatcataggaaacaccaagtttaagagcggggaaatccgcaagtttaaataaggctagtccgttatcagcgtgaaaacgcggcaccgagtcggtgcaaagagaatataatctttggtgtttcctatgatcgcggttctatctagttacgcgttaaaccaactagaa

SEQ ID NO: 3438 - RNA, 169 nt, synthetic construct
  source 1..169: mol_type = other RNA
gttcatcataggaaacaccaagtttaagagcggggaaatccgcaagtttaaataaggctagtccgttatcagcgtgaaaacgcggcaccgagtcggtgcaaagagaatatcatatttggtgtttcctatgatcgcggttctatctagttacgcgttaaaccaactagaa

SEQ ID NO: 3439 - RNA, 169 nt, synthetic construct
  source 1..169: mol_type = other RNA
gttcatcataggaaacaccaagtttaagagcggggaaatccgcaagtttaaataaggctagtccgttatcagcgtgaaaacgcggcaccgagtcggtgcaaagagaatatcatcttcggtgtttcctatgatcgcggttctatctagttacgcgttaaaccaactagaa

SEQ ID NO: 3440 - RNA, 169 nt, synthetic construct
  source 1..169: mol_type = other RNA
gttcatcataggaaacaccaagtttaagagcggggaaatccgcaagtttaaataaggctagtccgttatcagcgtgaaaacgcggcaccgagtcggtgcaaagagaatatcatctttggtgtttcctatgatcgcggttctatctagttacgcgttaaaccaactagaa

SEQ ID NO: 3441 - RNA, 169 nt, synthetic construct
  source 1..169: mol_type = other RNA
gttcatcataggaaacaccaagtttaagagcggggaaatccgcaagtttaaataaggctagtccgttatcagcgtgaaaacgcggcaccgagtcggtgcaaagagaatatcatttttggtgtttcctatgatcgcggttctatctagttacgcgttaaaccaactagaa

SEQ ID NO: 3442 - RNA, 169 nt, synthetic construct
  source 1..169: mol_type = other RNA
gttcatcataggaaacaccaagtttaagagcggggaaatccgcaagtttaaataaggctagtccgttatcagcgtgaaaacgcggcaccgagtcggtgcaaagagaatattatctttggtgtttcctatgatcgcggttctatctagttacgcgttaaaccaactagaa

SEQ ID NO: 3443 - RNA, 169 nt, synthetic construct
  source 1..169: mol_type = other RNA
gttcatcataggaaacaccaagtttaagagcggggaaatccgcaagtttaaataaggctagtccgttatcagcgtgaaaacgcggcaccgagtcggtgcaaggaaaacatcatctttggtgtttcctatgatcgcggttctatctagttacgcgttaaaccaactagaa

SEQ ID NO: 3444 - RNA, 169 nt, synthetic construct
  source 1..169: mol_type = other RNA
gttcatcataggaaacaccaagtttaagagcggggaaatccgcaagtttaaataaggctagtccgttatcagcgtgaaaacgcggcaccgagtcggtgcaaggaaaatataatctttggtgtttcctatgatcgcggttctatctagttacgcgttaaaccaactagaa

SEQ ID NO: 3445 - RNA, 169 nt, synthetic construct
  source 1..169: mol_type = other RNA
gttcatcataggaaacaccaagtttaagagcggggaaatccgcaagtttaaataaggctagtccgttatcagcgtgaaaacgcggcaccgagtcggtgcaaggaaaatatcatatttggtgtttcctatgatcgcggttctatctagttacgcgttaaaccaactagaa

SEQ ID NO: 3446 - RNA, 169 nt, synthetic construct
  source 1..169: mol_type = other RNA
gttcatcataggaaacaccaagtttaagagcggggaaatccgcaagtttaaataaggctagtccgttatcagcgtgaaaacgcggcaccgagtcggtgcaaggaaaatatcatcttcggtgtttcctatgatcgcggttctatctagttacgcgttaaaccaactagaa

SEQ ID NO: 3447 - RNA, 169 nt, synthetic construct
  source 1..169: mol_type = other RNA
gttcatcataggaaacaccaagtttaagagcggggaaatccgcaagtttaaataaggctagtccgttatcagcgtgaaaacgcggcaccgagtcggtgcaaggaaaatatcatctttggtgtttcctatgatcgcggttctatctagttacgcgttaaaccaactagaa

SEQ ID NO: 3448 - RNA, 169 nt, synthetic construct
  source 1..169: mol_type = other RNA
gttcatcataggaaacaccaagtttaagagcggggaaatccgcaagtttaaataaggctagtccgttatcagcgtgaaaacgcggcaccgagtcggtgcaaggaaaatatcatttttggtgtttcctatgatcgcggttctatctagttacgcgttaaaccaactagaa

SEQ ID NO: 3449 - RNA, 169 nt, synthetic construct
  source 1..169: mol_type = other RNA
gttcatcataggaaacaccaagtttaagagcggggaaatccgcaagtttaaataaggctagtccgttatcagcgtgaaaacgcggcaccgagtcggtgcaaggaaaatattatctttggtgtttcctatgatcgcggttctatctagttacgcgttaaaccaactagaa

SEQ ID NO: 3450 - RNA, 169 nt, synthetic construct
  source 1..169: mol_type = other RNA
gttcatcataggaaacaccaagtttaagagcggggaaatccgcaagtttaaataaggctagtccgttatcagcgtgaaaacgcggcaccgagtcggtgcaaggagaatatcatctttggtgtttcctatgatcgcggttctatctagttacgcgttaaaccaactagaa

SEQ ID NO: 3451 - RNA, 26 nt, synthetic construct
  source 1..26: mol_type = other RNA
aaacatcatctttggtgtttcctatg

SEQ ID NO: 3452 - RNA, 26 nt, synthetic construct
  source 1..26: mol_type = other RNA
aaatataatctttggtgtttcctatg

SEQ ID NO: 3453 - RNA, 26 nt, synthetic construct
  source 1..26: mol_type = other RNA
aaatatcatatttggtgtttcctatg

SEQ ID NO: 3454 - RNA, 26 nt, synthetic construct
  source 1..26: mol_type = other RNA
aaatatcatcttcggtgtttcctatg

SEQ ID NO: 3455 - RNA, 26 nt, synthetic construct
  source 1..26: mol_type = other RNA
aaatatcatctttggagtttcctatg

SEQ ID NO: 3456 - RNA, 26 nt, synthetic construct
  source 1..26: mol_type = other RNA
aaatatcatctttggcgtttcctatg

SEQ ID NO: 3457 - RNA, 26 nt, synthetic construct
  source 1..26: mol_type = other RNA
aaatatcatctttggggtttcctatg

SEQ ID NO: 3458 - RNA, 26 nt, synthetic construct
  source 1..26: mol_type = other RNA
aaatatcatctttggtgtatcctatg

SEQ ID NO: 3459 - RNA, 26 nt, synthetic construct
  source 1..26: mol_type = other RNA
aaatatcatctttggtgtctcctatg

SEQ ID NO: 3460 - RNA, 26 nt, synthetic construct
  source 1..26: mol_type = other RNA
aaatatcatctttggtgtgtcctatg

SEQ ID NO: 3461 - RNA, 26 nt, synthetic construct
  source 1..26: mol_type = other RNA
aaatatcatctttggtgtttcatatg

SEQ ID NO: 3462 - RNA, 26 nt, synthetic construct
  source 1..26: mol_type = other RNA
aaatatcatctttggtgtttcctacg

SEQ ID NO: 3463 - RNA, 26 nt, synthetic construct
  source 1..26: mol_type = other RNA
aaatatcatctttggtgtttcgtatg

SEQ ID NO: 3464 - RNA, 26 nt, synthetic construct
  source 1..26: mol_type = other RNA
aaatatcatctttggtgtttcttatg

SEQ ID NO: 3465 - RNA, 26 nt, synthetic construct
  source 1..26: mol_type = other RNA
aaatatcatttttggtgtttcctatg

SEQ ID NO: 3466 - RNA, 26 nt, synthetic construct
  source 1..26: mol_type = other RNA
aaatattatctttggtgtttcctatg

SEQ ID NO: 3467 - RNA, 26 nt, synthetic construct
  source 1..26: mol_type = other RNA
gaatatcatctttggtgtttcctatg

SEQ ID NO: 3468 - RNA, 33 nt, synthetic construct
  source 1..33: mol_type = other RNA
taaaagaaaatatcatctttggtgtttcctatg

SEQ ID NO: 3469 - RNA, 33 nt, synthetic construct
  source 1..33: mol_type = other RNA
tcaaagaaaatatcatctttggtgtttcctatg

SEQ ID NO: 3470 - RNA, 33 nt, synthetic construct
  source 1..33: mol_type = other RNA
ttaaagaaaacatcatctttggtgtttcctatg

SEQ ID NO: 3471 - RNA, 33 nt, synthetic construct
  source 1..33: mol_type = other RNA
ttaaagaaaatataatctttggtgtttcctatg

SEQ ID NO: 3472 - RNA, 33 nt, synthetic construct
  source 1..33: mol_type = other RNA
ttaaagaaaatatcatatttggtgtttcctatg

SEQ ID NO: 3473 - RNA, 33 nt, synthetic construct
  source 1..33: mol_type = other RNA
ttaaagaaaatatcatcttcggtgtttcctatg

SEQ ID NO: 3474 - RNA, 33 nt, synthetic construct
  source 1..33: mol_type = other RNA
ttaaagaaaatatcatctttggagtttcctatg

SEQ ID NO: 3475 - RNA, 33 nt, synthetic construct
  source 1..33: mol_type = other RNA
ttaaagaaaatatcatctttggcgtttcctatg

SEQ ID NO: 3476 - RNA, 33 nt, synthetic construct
  source 1..33: mol_type = other RNA
ttaaagaaaatatcatctttggggtttcctatg

SEQ ID NO: 3477 - RNA, 33 nt, synthetic construct
  source 1..33: mol_type = other RNA
ttaaagaaaatatcatctttggtgtatcctatg

SEQ ID NO: 3478 - RNA, 33 nt, synthetic construct
  source 1..33: mol_type = other RNA
ttaaagaaaatatcatctttggtgtctcctatg

SEQ ID NO: 3479 - RNA, 33 nt, synthetic construct
  source 1..33: mol_type = other RNA
ttaaagaaaatatcatctttggtgtgtcctatg

SEQ ID NO: 3480 - RNA, 33 nt, synthetic construct
  source 1..33: mol_type = other RNA
ttaaagaaaatatcatctttggtgtttcatatg

SEQ ID NO: 3481 - RNA, 33 nt, synthetic construct
  source 1..33: mol_type = other RNA
ttaaagaaaatatcatctttggtgtttcctacg

SEQ ID NO: 3482 - RNA, 33 nt, synthetic construct
  source 1..33: mol_type = other RNA
ttaaagaaaatatcatctttggtgtttcgtatg

SEQ ID NO: 3483 - RNA, 33 nt, synthetic construct
  source 1..33: mol_type = other RNA
ttaaagaaaatatcatctttggtgtttcttatg

SEQ ID NO: 3484 - RNA, 33 nt, synthetic construct
  source 1..33: mol_type = other RNA
ttaaagaaaatatcatttttggtgtttcctatg

SEQ ID NO: 3485 - RNA, 33 nt, synthetic construct
  source 1..33: mol_type = other RNA
ttaaagaaaatattatctttggtgtttcctatg

SEQ ID NO: 3486 - RNA, 33 nt, synthetic construct
  source 1..33: mol_type = other RNA
ttaaagagaatatcatctttggtgtttcctatg

SEQ ID NO: 3487 - RNA, 33 nt, synthetic construct
  source 1..33: mol_type = other RNA
ttaaggaaaatatcatctttggtgtttcctatg

SEQ ID NO: 3488 - RNA, 47 nt, synthetic construct
  source 1..47: mol_type = other RNA
aatgccaggaacaataaaggagaacattatattcggtgtgagttatg

SEQ ID NO: 3489 - RNA, 47 nt, synthetic construct
  source 1..47: mol_type = other RNA
catgccaggaacaataaaggagaacattatattcggtgtgagttatg

SEQ ID NO: 3490 - RNA, 47 nt, synthetic construct
  source 1..47: mol_type = other RNA
tatgccaggcaccattaaagaaaatatcatctttggtgtttcctatg

SEQ ID NO: 3491 - RNA, 47 nt, synthetic construct
  source 1..47: mol_type = other RNA
tatgcccggcaccattaaagaaaatatcatctttggtgtttcctatg

SEQ ID NO: 3492 - RNA, 47 nt, synthetic construct
  source 1..47: mol_type = other RNA
tatgccgggcaccattaaagaaaatatcatctttggtgtttcctatg

SEQ ID NO: 3493 - RNA, 47 nt, synthetic construct
  source 1..47: mol_type = other RNA
tatgcctggaaccattaaagaaaatatcatctttggtgtttcctatg

SEQ ID NO: 3494 - RNA, 47 nt, synthetic construct
  source 1..47: mol_type = other RNA
tatgcctggcacaattaaagaaaatatcatctttggtgtttcctatg

SEQ ID NO: 3495 - RNA, 47 nt, synthetic construct
  source 1..47: mol_type = other RNA
tatgcctggcaccataaaagaaaatatcatctttggtgtttcctatg

SEQ ID NO: 3496 - RNA, 47 nt, synthetic construct
  source 1..47: mol_type = other RNA
tatgcctggcaccatcaaagaaaatatcatctttggtgtttcctatg

SEQ ID NO: 3497 - RNA, 47 nt, synthetic construct
  source 1..47: mol_type = other RNA
tatgcctggcaccattaaagaaaacatcatctttggtgtttcctatg

SEQ ID NO: 3498 - RNA, 47 nt, synthetic construct
  source 1..47: mol_type = other RNA
tatgcctggcaccattaaagaaaatataatctttggtgtttcctatg

SEQ ID NO: 3499 - RNA, 47 nt, synthetic construct
  source 1..47: mol_type = other RNA
tatgcctggcaccattaaagaaaatatcatatttggtgtttcctatg

SEQ ID NO: 3500 - RNA, 47 nt, synthetic construct
  source 1..47: mol_type = other RNA
tatgcctggcaccattaaagaaaatatcatcttcggtgtttcctatg

SEQ ID NO: 3501 - RNA, 47 nt, synthetic construct
  source 1..47: mol_type = other RNA
tatgcctggcaccattaaagaaaatatcatctttggagtttcctatg

SEQ ID NO: 3502 - RNA, 47 nt, synthetic construct
  source 1..47: mol_type = other RNA
tatgcctggcaccattaaagaaaatatcatctttggcgtttcctatg

SEQ ID NO: 3503 - RNA, 47 nt, synthetic construct
  source 1..47: mol_type = other RNA
tatgcctggcaccattaaagaaaatatcatctttggggtttcctatg

SEQ ID NO: 3504 - RNA, 47 nt, synthetic construct
  source 1..47: mol_type = other RNA
tatgcctggcaccattaaagaaaatatcatctttggtgtatcctatg

SEQ ID NO: 3505 - RNA, 47 nt, synthetic construct
  source 1..47: mol_type = other RNA
tatgcctggcaccattaaagaaaatatcatctttggtgtctcctatg

SEQ ID NO: 3506 - RNA, 47 nt, synthetic construct
  source 1..47: mol_type = other RNA
tatgcctggcaccattaaagaaaatatcatctttggtgtgtcctatg

SEQ ID NO: 3507 - RNA, 47 nt, synthetic construct
  source 1..47: mol_type = other RNA
tatgcctggcaccattaaagaaaatatcatctttggtgtttcatatg

SEQ ID NO: 3508 - RNA, 47 nt, synthetic construct
  source 1..47: mol_type = other RNA
tatgcctggcaccattaaagaaaatatcatctttggtgtttcctacg

SEQ ID NO: 3509 - RNA, 47 nt, synthetic construct
  source 1..47: mol_type = other RNA
tatgcctggcaccattaaagaaaatatcatctttggtgtttcgtatg

SEQ ID NO: 3510 - RNA, 47 nt, synthetic construct
  source 1..47: mol_type = other RNA
tatgcctggcaccattaaagaaaatatcatctttggtgtttcttatg

SEQ ID NO: 3511 - RNA, 47 nt, synthetic construct
  source 1..47: mol_type = other RNA
tatgcctggcaccattaaagaaaatatcatttttggtgtttcctatg

SEQ ID NO: 3512 - RNA, 47 nt, synthetic construct
  source 1..47: mol_type = other RNA
tatgcctggcaccattaaagaaaatattatctttggtgtttcctatg

SEQ ID NO: 3513 - RNA, 47 nt, synthetic construct
  source 1..47: mol_type = other RNA
tatgcctggcaccattaaagagaatatcatctttggtgtttcctatg

SEQ ID NO: 3514 - RNA, 47 nt, synthetic construct
  source 1..47: mol_type = other RNA
tatgcctggcaccattaaggaaaatatcatctttggtgtttcctatg

SEQ ID NO: 3515 - RNA, 47 nt, synthetic construct
  source 1..47: mol_type = other RNA
tatgcctggcacgattaaagaaaatatcatctttggtgtttcctatg

SEQ ID NO: 3516 - RNA, 47 nt, synthetic construct
  source 1..47: mol_type = other RNA
tatgcctggcactattaaagaaaatatcatctttggtgtttcctatg

SEQ ID NO: 3517 - RNA, 47 nt, synthetic construct
  source 1..47: mol_type = other RNA
tatgcctgggaccattaaagaaaatatcatctttggtgtttcctatg

SEQ ID NO: 3518 - RNA, 47 nt, synthetic construct
  source 1..47: mol_type = other RNA
tatgcctggtaccattaaagaaaatatcatctttggtgtttcctatg

SEQ ID NO: 3519 - RNA, 18 nt, synthetic construct
  source 1..18: mol_type = other RNA
aagagaatatcatctttg

SEQ ID NO: 3520 - RNA, 18 nt, synthetic construct
  source 1..18: mol_type = other RNA
aggaaaatatcatctttg

SEQ ID NO: 3521 - RNA, 19 nt, synthetic construct
  source 1..19: mol_type = other RNA
aaagaaaacataatctttg

SEQ ID NO: 3522 - RNA, 19 nt, synthetic construct
  source 1..19: mol_type = other RNA
aaagaaaacatcatatttg

SEQ ID NO: 3523 - RNA, 19 nt, synthetic construct
  source 1..19: mol_type = other RNA
aaagaaaacatcatcttcg

SEQ ID NO: 3524 - RNA, 19 nt, synthetic construct
  source 1..19: mol_type = other RNA
aaagaaaacatcatctttg

SEQ ID NO: 3525 - RNA, 19 nt, synthetic construct
  source 1..19: mol_type = other RNA
aaagaaaacatcatttttg

SEQ ID NO: 3526 - RNA, 19 nt, synthetic construct
  source 1..19: mol_type = other RNA
aaagaaaacattatctttg

SEQ ID NO: 3527 - RNA, 19 nt, synthetic construct
  source 1..19: mol_type = other RNA
aaagaaaatataatatttg

SEQ ID NO: 3528 - RNA, 19 nt, synthetic construct
  source 1..19: mol_type = other RNA
aaagaaaatataatcttcg

SEQ ID NO: 3529 - RNA, 19 nt, synthetic construct
  source 1..19: mol_type = other RNA
aaagaaaatataatctttg

SEQ ID NO: 3530 - RNA, 19 nt, synthetic construct
  source 1..19: mol_type = other RNA
aaagaaaatataatttttg

SEQ ID NO: 3531 - RNA, 19 nt, synthetic construct
  source 1..19: mol_type = other RNA
aaagaaaatatcatattcg

SEQ ID NO: 3532 - RNA, 19 nt, synthetic construct
  source 1..19: mol_type = other RNA
aaagaaaatatcatatttg

SEQ ID NO: 3533 - RNA, 19 nt, synthetic construct
  source 1..19: mol_type = other RNA
aaagaaaatatcatcttcg

SEQ ID NO: 3534 - RNA, 19 nt, synthetic construct
  source 1..19: mol_type = other RNA
aaagaaaatatcattttcg

SEQ ID NO: 3535 - RNA, 19 nt, synthetic construct
  source 1..19: mol_type = other RNA
aaagaaaatatcatttttg

SEQ ID NO: 3536 - RNA, 19 nt, synthetic construct
  source 1..19: mol_type = other RNA
aaagaaaatattatatttg

SEQ ID NO: 3537 - RNA, 19 nt, synthetic construct
  source 1..19: mol_type = other RNA
aaagaaaatattatcttcg

SEQ ID NO: 3538 - RNA, 19 nt, synthetic construct
  source 1..19: mol_type = other RNA
aaagaaaatattatctttg

SEQ ID NO: 3539 - RNA, 19 nt, synthetic construct
  source 1..19: mol_type = other RNA
aaagaaaatattatttttg

SEQ ID NO: 3540 - RNA, 19 nt, synthetic construct
  source 1..19: mol_type = other RNA
aaagagaacatcatctttg

SEQ ID NO: 3541 - RNA, 19 nt, synthetic construct
  source 1..19: mol_type = other RNA
aaagagaatataatctttg

SEQ ID NO: 3542 - RNA, 19 nt, synthetic construct
  source 1..19: mol_type = other RNA
aaagagaatatcatatttg

SEQ ID NO: 3543 - RNA, 19 nt, synthetic construct
  source 1..19: mol_type = other RNA
aaagagaatatcatcttcg

SEQ ID NO: 3544 - RNA, 19 nt, synthetic construct
  source 1..19: mol_type = other RNA
aaagagaatatcatctttg

SEQ ID NO: 3545 - RNA, 19 nt, synthetic construct
  source 1..19: mol_type = other RNA
aaagagaatatcatttttg

SEQ ID NO: 3546 - RNA, 19 nt, synthetic construct
  source 1..19: mol_type = other RNA
aaagagaatattatctttg

SEQ ID NO: 3547 - RNA, 19 nt, synthetic construct
  source 1..19: mol_type = other RNA
aaggaaaacatcatctttg

SEQ ID NO: 3548 - RNA, 19 nt, synthetic construct
  source 1..19: mol_type = other RNA
aaggaaaatataatctttg

SEQ ID NO: 3549 - RNA, 19 nt, synthetic construct
  source 1..19: mol_type = other RNA
aaggaaaatatcatatttg

SEQ ID NO: 3550 - RNA, 19 nt, synthetic construct
  source 1..19: mol_type = other RNA
aaggaaaatatcatcttcg

SEQ ID NO: 3551 - RNA, 19 nt, synthetic construct
  source 1..19: mol_type = other RNA
aaggaaaatatcatctttg

SEQ ID NO: 3552 - RNA, 19 nt, synthetic construct
  source 1..19: mol_type = other RNA
aaggaaaatatcatttttg

SEQ ID NO: 3553 - RNA, 19 nt, synthetic construct
  source 1..19: mol_type = other RNA
aaggaaaatattatctttg

SEQ ID NO: 3554 - RNA, 19 nt, synthetic construct
  source 1..19: mol_type = other RNA
aaggagaatatcatctttg

SEQ ID NO: 3555 - RNA, 20 nt, synthetic construct
  source 1..20: mol_type = other RNA
attaaggaaaacatcatctt

SEQ ID NO: 3556 - RNA, 20 nt, synthetic construct
  source 1..20: mol_type = other RNA
attaaggaaaatatcatctt

SEQ ID NO: 3557 - RNA, 20 nt, synthetic construct
  source 1..20: mol_type = other RNA
atcaaagaaaacatcatctt

SEQ ID NO: 3558 - RNA, 20 nt, synthetic construct
  source 1..20: mol_type = other RNA
atcaaggaaaacatcatctt

SEQ ID NO: 3559 - RNA, 20 nt, synthetic construct
  source 1..20: mol_type = other RNA
atcaaggaaaatatcatctt

SEQ ID NO: 3560 - RNA, 99 nt, synthetic construct
  source 1..99: mol_type = other RNA
gattaaggaaaacatcatcttgtttaagagcggggaaatccgcaagtttaaataaggctagtccgttatcagcgtgaaaacgcggcaccgagtcggtgc

SEQ ID NO: 3561 - RNA, 99 nt, synthetic construct
  source 1..99: mol_type = other RNA
gattaaggaaaatatcatcttgtttaagagcggggaaatccgcaagtttaaataaggctagtccgttatcagcgtgaaaacgcggcaccgagtcggtgc

SEQ ID NO: 3562 - RNA, 99 nt, synthetic construct
  source 1..99: mol_type = other RNA
gatcaaagaaaacatcatcttgtttaagagcggggaaatccgcaagtttaaataaggctagtccgttatcagcgtgaaaacgcggcaccgagtcggtgc

SEQ ID NO: 3563 - RNA, 99 nt, synthetic construct
  source 1..99: mol_type = other RNA
gatcaaggaaaacatcatcttgtttaagagcggggaaatccgcaagtttaaataaggctagtccgttatcagcgtgaaaacgcggcaccgagtcggtgc

SEQ ID NO: 3564 - RNA, 99 nt, synthetic construct
  source 1..99: mol_type = other RNA
gatcaaggaaaatatcatcttgtttaagagcggggaaatccgcaagtttaaataaggctagtccgttatcagcgtgaaaacgcggcaccgagtcggtgc

SEQ ID NO: 3565 - RNA, 33 nt, synthetic construct
  source 1..33: mol_type = other RNA
ttaaagagaacatcatcttcggtgtctcatacg

SEQ ID NO: 3566 - RNA, 33 nt, synthetic construct
  source 1..33: mol_type = other RNA
ttaaagagaacatcatcttcggtgtctcttacg

SEQ ID NO: 3567 - RNA, 33 nt, synthetic construct
  source 1..33: mol_type = other RNA
ttaaagagaacatcatcttcggtgtctcttatg

SEQ ID NO: 3568 - RNA, 33 nt, synthetic construct
  source 1..33: mol_type = other RNA
ttaaagagaacatcatctttggtgtatcttacg

SEQ ID NO: 3569 - RNA, 33 nt, synthetic construct
  source 1..33: mol_type = other RNA
ttaaagagaacatcatctttggtgtctcatacg

SEQ ID NO: 3570 - RNA, 33 nt, synthetic construct
  source 1..33: mol_type = other RNA
ttaaagagaacatcatctttggtgtctcgtacg

SEQ ID NO: 3571 - RNA, 33 nt, synthetic construct
  source 1..33: mol_type = other RNA
ttaaagagaacatcatctttggtgtctcttacg

SEQ ID NO: 3572 - RNA, 33 nt, synthetic construct
  source 1..33: mol_type = other RNA
ttaaagagaacatcatctttggtgtctcttatg

SEQ ID NO: 3573 - RNA, 33 nt, synthetic construct
  source 1..33: mol_type = other RNA
ttaaagagaacatcatctttggtgtgtcttacg

SEQ ID NO: 3574 - RNA, 33 nt, synthetic construct
  source 1..33: mol_type = other RNA
ttaaagagaacatcatctttggtgtgtcttatg

SEQ ID NO: 3575 - RNA, 33 nt, synthetic construct
  source 1..33: mol_type = other RNA
ttaaagagaacatcatctttggtgttagctacg

SEQ ID NO: 3576 - RNA, 33 nt, synthetic construct
  source 1..33: mol_type = other RNA
ttaaagagaacatcatctttggtgtttcttacg

SEQ ID NO: 3577 - RNA, 33 nt, synthetic construct
  source 1..33: mol_type = other RNA
ttaaagagaacatcatctttggtgtttcttatg

SEQ ID NO: 3578 - RNA, 33 nt, synthetic construct
  source 1..33: mol_type = other RNA
ttaaagagaacattatctttggtgtctcttacg

SEQ ID NO: 3579 - RNA, 33 nt, synthetic construct
  source 1..33: mol_type = other RNA
ttaaagagaacattatctttggtgtctcttatg

SEQ ID NO: 3580 - RNA, 33 nt, synthetic construct
  source 1..33: mol_type = other RNA
ttaaagagaatatcatcttcggtgtctcttacg

SEQ ID NO: 3581 - RNA, 33 nt, synthetic construct
  source 1..33: mol_type = other RNA
tcaaagaaaacatcatcttcggtgtttcatacg

SEQ ID NO: 3582 - RNA, 33 nt, synthetic construct
  source 1..33: mol_type = other RNA
tcaaagaaaacatcatcttcggtgtttcatatg

SEQ ID NO: 3583 - RNA, 33 nt, synthetic construct
  source 1..33: mol_type = other RNA
tcaaagaaaacatcatcttcggtgtttcttacg

SEQ ID NO: 3584 - RNA, 33 nt, synthetic construct
  source 1..33: mol_type = other RNA
tcaaagaaaacatcatcttcggtgtttcttatg

SEQ ID NO: 3585 - RNA, 33 nt, synthetic construct
  source 1..33: mol_type = other RNA
tcaaagaaaacatcatctttggtgtttcatacg

SEQ ID NO: 3586 - RNA, 33 nt, synthetic construct
  source 1..33: mol_type = other RNA
tcaaagaaaacatcatctttggtgtttcatatg

SEQ ID NO: 3587 - RNA, 33 nt, synthetic construct
  source 1..33: mol_type = other RNA
tcaaagaaaacatcatctttggtgtttcttacg

SEQ ID NO: 3588 - RNA, 33 nt, synthetic construct
  source 1..33: mol_type = other RNA
tcaaagaaaacatcatctttggtgtttcttatg

SEQ ID NO: 3589 - RNA, 33 nt, synthetic construct
  source 1..33: mol_type = other RNA
tcaaagaaaatatcatcttcggtgtttcatacg

SEQ ID NO: 3590 - RNA, 33 nt, synthetic construct
  source 1..33: mol_type = other RNA
tcaaagaaaatatcatcttcggtgtttcatatg

SEQ ID NO: 3591 - RNA, 33 nt, synthetic construct
  source 1..33: mol_type = other RNA
tcaaagaaaatatcatcttcggtgtttcttacg

SEQ ID NO: 3592 - RNA, 33 nt, synthetic construct
  source 1..33: mol_type = other RNA
tcaaagaaaatatcatcttcggtgtttcttatg

SEQ ID NO: 3593 - RNA, 33 nt, synthetic construct
  source 1..33: mol_type = other RNA
tcaaagaaaatatcatctttggtgtttcatacg

SEQ ID NO: 3594 - RNA, 33 nt, synthetic construct
  source 1..33: mol_type = other RNA
tcaaagaaaatatcatctttggtgtttcatatg

SEQ ID NO: 3595 - RNA, 33 nt, synthetic construct
  source 1..33: mol_type = other RNA
tcaaagaaaatatcatctttggtgtttcttacg

SEQ ID NO: 3596 - RNA, 33 nt, synthetic construct
  source 1..33: mol_type = other RNA
tcaaagaaaatatcatctttggtgtttcttatg

SEQ ID NO: 3597 - RNA, 33 nt, synthetic construct
  source 1..33: mol_type = other RNA
tcaaggaaaacatcatcttcggtgtttcatacg

SEQ ID NO: 3598 - RNA, 33 nt, synthetic construct
  source 1..33: mol_type = other RNA
tcaaggaaaacatcatcttcggtgtttcatatg

SEQ ID NO: 3599 - RNA, 33 nt, synthetic construct
  source 1..33: mol_type = other RNA
tcaaggaaaacatcatcttcggtgtttcttacg

SEQ ID NO: 3600 - RNA, 33 nt, synthetic construct
  source 1..33: mol_type = other RNA
tcaaggaaaacatcatcttcggtgtttcttatg

SEQ ID NO: 3601 - RNA, 33 nt, synthetic construct
  source 1..33: mol_type = other RNA
tcaaggaaaacatcatctttggtgtttcatacg

SEQ ID NO: 3602 - RNA, 33 nt, synthetic construct
  source 1..33: mol_type = other RNA
tcaaggaaaacatcatctttggtgtttcatatg

SEQ ID NO: 3603 - RNA, 33 nt, synthetic construct
  source 1..33: mol_type = other RNA
tcaaggaaaacatcatctttggtgtttcttacg

SEQ ID NO: 3604 - RNA, 33 nt, synthetic construct
  source 1..33: mol_type = other RNA
tcaaggaaaacatcatctttggtgtttcttatg

SEQ ID NO: 3605 - RNA, 33 nt, synthetic construct
  source 1..33: mol_type = other RNA
tcaaggaaaatatcatcttcggtgtttcatacg

SEQ ID NO: 3606 - RNA, 33 nt, synthetic construct
  source 1..33: mol_type = other RNA
tcaaggaaaatatcatcttcggtgtttcatatg

SEQ ID NO: 3607 - RNA, 33 nt, synthetic construct
  source 1..33: mol_type = other RNA
tcaaggaaaatatcatcttcggtgtttcttacg

SEQ ID NO: 3608 - RNA, 33 nt, synthetic construct
  source 1..33: mol_type = other RNA
tcaaggaaaatatcatcttcggtgtttcttatg

SEQ ID NO: 3609 - RNA, 33 nt, synthetic construct
  source 1..33: mol_type = other RNA
tcaaggaaaatatcatctttggtgtttcatacg

SEQ ID NO: 3610 - RNA, 33 nt, synthetic construct
  source 1..33: mol_type = other RNA
tcaaggaaaatatcatctttggtgtttcatatg

SEQ ID NO: 3611 - RNA, 33 nt, synthetic construct
  source 1..33: mol_type = other RNA
tcaaggaaaatatcatctttggtgtttcttacg

SEQ ID NO: 3612 - RNA, 33 nt, synthetic construct
  source 1..33: mol_type = other RNA
tcaaggaaaatatcatctttggtgtttcttatg

SEQ ID NO: 3613 - RNA, 33 nt, synthetic construct
  source 1..33: mol_type = other RNA
ttaaagaaaacatcatcttcggtgtttcatacg

SEQ ID NO: 3614 - RNA, 33 nt, synthetic construct
  source 1..33: mol_type = other RNA
ttaaagaaaacatcatcttcggtgtttcatatg

SEQ ID NO: 3615 - RNA, 33 nt, synthetic construct
  source 1..33: mol_type = other RNA
ttaaagaaaacatcatcttcggtgtttcttacg

SEQ ID NO: 3616 - RNA, 33 nt, synthetic construct
  source 1..33: mol_type = other RNA
ttaaagaaaacatcatcttcggtgtttcttatg

SEQ ID NO: 3617 - RNA, 33 nt, synthetic construct
  source 1..33: mol_type = other RNA
ttaaagaaaacatcatctttggtgtttcatacg

SEQ ID NO: 3618 - RNA, 33 nt, synthetic construct
  source 1..33: mol_type = other RNA
ttaaagaaaacatcatctttggtgtttcatatg

SEQ ID NO: 3619 - RNA, 33 nt, synthetic construct
  source 1..33: mol_type = other RNA
ttaaagaaaacatcatctttggtgtttcttacg

SEQ ID NO: 3620 - RNA, 33 nt, synthetic construct
  source 1..33: mol_type = other RNA
ttaaagaaaacatcatctttggtgtttcttatg

SEQ ID NO: 3621 - RNA, 33 nt, synthetic construct
  source 1..33: mol_type = other RNA
ttaaagaaaatatcatcttcggtgtttcatacg

SEQ ID NO: 3622 - RNA, 33 nt, synthetic construct
  source 1..33: mol_type = other RNA
ttaaagaaaatatcatcttcggtgtttcatatg

SEQ ID NO: 3623 - RNA, 33 nt, synthetic construct
  source 1..33: mol_type = other RNA
ttaaagaaaatatcatcttcggtgtttcttacg

SEQ ID NO: 3624 - RNA, 33 nt, synthetic construct
  source 1..33: mol_type = other RNA
ttaaagaaaatatcatcttcggtgtttcttatg

SEQ ID NO: 3625 - RNA, 33 nt, synthetic construct
  source 1..33: mol_type = other RNA
ttaaagaaaatatcatctttggtgtttcatacg

SEQ ID NO: 3626 - RNA, 33 nt, synthetic construct
  source 1..33: mol_type = other RNA
ttaaagaaaatatcatctttggtgtttcttacg

SEQ ID NO: 3627 - RNA, 33 nt, synthetic construct
  source 1..33: mol_type = other RNA
ttaaggaaaacatcatcttcggtgtttcttacg

SEQ ID NO: 3628 - RNA, 33 nt, synthetic construct
  source 1..33: mol_type = other RNA
ttaaggaaaacatcatcttcggtgtttcttatg

SEQ ID NO: 3629 - RNA, 33 nt, synthetic construct
  source 1..33: mol_type = other RNA
ttaaggaaaacatcatctttggtgtttcatacg

SEQ ID NO: 3630 - RNA, 33 nt, synthetic construct
  source 1..33: mol_type = other RNA
ttaaggaaaacatcatctttggtgtttcatatg

SEQ ID NO: 3631 - RNA, 33 nt, synthetic construct
  source 1..33: mol_type = other RNA
ttaaggaaaacatcatctttggtgtttcttacg

SEQ ID NO: 3632 - RNA, 33 nt, synthetic construct
  source 1..33: mol_type = other RNA
ttaaggaaaacatcatctttggtgtttcttatg

SEQ ID NO: 3633 - RNA, 33 nt, synthetic construct
  source 1..33: mol_type = other RNA
ttaaggaaaatatcatcttcggtgtttcatacg

SEQ ID NO: 3634 - RNA, 33 nt, synthetic construct
  source 1..33: mol_type = other RNA
ttaaggaaaatatcatcttcggtgtttcatatg

SEQ ID NO: 3635 - RNA, 33 nt, synthetic construct
  source 1..33: mol_type = other RNA
ttaaggaaaatatcatcttcggtgtttcttacg

SEQ ID NO: 3636 - RNA, 33 nt, synthetic construct
  source 1..33: mol_type = other RNA
ttaaggaaaatatcatcttcggtgtttcttatg

SEQ ID NO: 3637 - RNA, 33 nt, synthetic construct
  source 1..33: mol_type = other RNA
ttaaggaaaatatcatctttggtgtttcttacg

SEQ ID NO: 3638 - RNA, 33 nt, synthetic construct
  source 1..33: mol_type = other RNA
ttaaggaaaatatcatctttggtgtttcttatg

SEQ ID NO: 3639 - RNA, 34 nt, synthetic construct
  source 1..34: mol_type = other RNA
attaaagagaacatcatcttcggtgtctcatacg

SEQ ID NO: 3640 - RNA, 34 nt, synthetic construct
  source 1..34: mol_type = other RNA
attaaagagaacatcatcttcggtgtctcttacg

SEQ ID NO: 3641 - RNA, 34 nt, synthetic construct
  source 1..34: mol_type = other RNA
attaaagagaacatcatcttcggtgtctcttatg

SEQ ID NO: 3642 - RNA, 34 nt, synthetic construct
  source 1..34: mol_type = other RNA
attaaagagaacatcatctttggagtctcttacg

SEQ ID NO: 3643 - RNA, 34 nt, synthetic construct
  source 1..34: mol_type = other RNA
attaaagagaacatcatctttggcgtctcttatg

SEQ ID NO: 3644 - RNA, 34 nt, synthetic construct
  source 1..34: mol_type = other RNA
attaaagagaacatcatctttggtgtctcatacg

SEQ ID NO: 3645 - RNA, 34 nt, synthetic construct
  source 1..34: mol_type = other RNA
attaaagagaacatcatctttggtgtctcgtacg

SEQ ID NO: 3646 - RNA, 34 nt, synthetic construct
  source 1..34: mol_type = other RNA
attaaagagaacatcatctttggtgtctcgtatg

SEQ ID NO: 3647 - RNA, 34 nt, synthetic construct
  source 1..34: mol_type = other RNA
attaaagagaacatcatctttggtgtctcttacg

SEQ ID NO: 3648 - RNA, 34 nt, synthetic construct
  source 1..34: mol_type = other RNA
attaaagagaacatcatctttggtgtctcttatg

SEQ ID NO: 3649 - RNA, 34 nt, synthetic construct
  source 1..34: mol_type = other RNA
attaaagagaacatcatctttggtgtgtcttacg

SEQ ID NO: 3650 - RNA, 34 nt, synthetic construct
  source 1..34: mol_type = other RNA
attaaagagaacatcatctttggtgtgtcttatg

SEQ ID NO: 3651 - RNA, 34 nt, synthetic construct
  source 1..34: mol_type = other RNA
attaaagagaacatcatctttggtgtttcttacg

SEQ ID NO: 3652 - RNA, 34 nt, synthetic construct
  source 1..34: mol_type = other RNA
attaaagagaacatcatctttggtgtttcttatg

SEQ ID NO: 3653 - RNA, 34 nt, synthetic construct
  source 1..34: mol_type = other RNA
attaaagagaacattatcttcggtgtctcttatg

SEQ ID NO: 3654 - RNA, 34 nt, synthetic construct
  source 1..34: mol_type = other RNA
attaaagagaacattatctttggtgtctcttacg

SEQ ID NO: 3655 - RNA, 34 nt, synthetic construct
  source 1..34: mol_type = other RNA
attaaagaaaacatcatctttggtgtttcgtacg

SEQ ID NO: 3656 - RNA, 34 nt, synthetic construct
  source 1..34: mol_type = other RNA
attaaggaaaacatcatctttggtgtttcctacg

SEQ ID NO: 3657 - RNA, 34 nt, synthetic construct
  source 1..34: mol_type = other RNA
attaaggaaaacatcatctttggtgtttcctatg

SEQ ID NO: 3658 - RNA, 34 nt, synthetic construct
  source 1..34: mol_type = other RNA
attaaggaaaacatcatctttggtgtttcgtacg

SEQ ID NO: 3659 - RNA, 34 nt, synthetic construct
  source 1..34: mol_type = other RNA
attaaggaaaacatcatctttggtgtttcgtatg

SEQ ID NO: 3660 - RNA, 34 nt, synthetic construct
  source 1..34: mol_type = other RNA
attaaggaaaatatcatctttggtgtttcctacg

SEQ ID NO: 3661 - RNA, 34 nt, synthetic construct
  source 1..34: mol_type = other RNA
attaaggaaaatatcatctttggtgtttcgtacg

SEQ ID NO: 3662 - RNA, 34 nt, synthetic construct
  source 1..34: mol_type = other RNA
attaaggaaaatatcatctttggtgtttcgtatg

SEQ ID NO: 3663 - RNA, 44 nt, synthetic construct
  source 1..44: mol_type = other RNA
gcctggcaccataaaggagaatatcatctttggtgtcagctacg

SEQ ID NO: 3664 - RNA, 44 nt, synthetic construct
  source 1..44: mol_type = other RNA
gcctggcaccataaaggagaatattatctttggtgtcagctacg

SEQ ID NO: 3665 - RNA, 44 nt, synthetic construct
  source 1..44: mol_type = other RNA
gcctggcaccatcaaagagaacatcatctttggtgtcagctacg

SEQ ID NO: 3666 - RNA, 44 nt, synthetic construct
  source 1..44: mol_type = other RNA
gcctggcaccatcaaagagaacatcatctttggtgtcagttacg

SEQ ID NO: 3667 - RNA, 44 nt, synthetic construct
  source 1..44: mol_type = other RNA
gcctggcaccatcaaagagaacattatctttggtgtcagctacg

SEQ ID NO: 3668 - RNA, 44 nt, synthetic construct
  source 1..44: mol_type = other RNA
gcctggcaccatcaaagagaatatcatctttggtgtcagttacg

SEQ ID NO: 3669 - RNA, 44 nt, synthetic construct
  source 1..44: mol_type = other RNA
gcctggcaccatcaaagagaatattatctttggtgtcagctacg

SEQ ID NO: 3670 - RNA, 44 nt, synthetic construct
  source 1..44: mol_type = other RNA
gcctggcaccatcaaagagaatattatctttggtgtcagttacg

SEQ ID NO: 3671 - RNA, 44 nt, synthetic construct
  source 1..44: mol_type = other RNA
gcctggcaccatcaaggagaacataatctttggtgtcagctacg

SEQ ID NO: 3672 - RNA, 44 nt, synthetic construct
  source 1..44: mol_type = other RNA
gcctggcaccatcaaggagaacatcatctttggtgtcagttacg

SEQ ID NO: 3673 - RNA, 44 nt, synthetic construct
  source 1..44: mol_type = other RNA
gcctggcaccatcaaggagaacattatctttggtgtcagctacg

SEQ ID NO: 3674 - RNA, 44 nt, synthetic construct
  source 1..44: mol_type = other RNA
gcctggcaccatcaaggagaatatcatctttggtgtcagctacg

SEQ ID NO: 3675 - RNA, 44 nt, synthetic construct
  source 1..44: mol_type = other RNA
gcctggcaccatcaaggagaatatcatctttggtgtcagttacg

SEQ ID NO: 3676 - RNA, 44 nt, synthetic construct
  source 1..44: mol_type = other RNA
gcctggcaccatcaaggagaatattatctttggtgtcagttacg

SEQ ID NO: 3677 - RNA, 44 nt, synthetic construct
  source 1..44: mol_type = other RNA
gcctggcaccattaaagagaacatcatctttggtgtcagctacg

SEQ ID NO: 3678 - RNA, 44 nt, synthetic construct
  source 1..44: mol_type = other RNA
gcctggcaccattaaagagaacatcatctttggtgtcagctatg

SEQ ID NO: 3679 - RNA, 44 nt, synthetic construct
  source 1..44: mol_type = other RNA
gccgggcaccatcaaagaaaatatcatctttggtgtctcatacg

SEQ ID NO: 3680 - RNA, 44 nt, synthetic construct
  source 1..44: mol_type = other RNA
gccgggcaccatcaaagaaaatatcatctttggtgtctcatatg

SEQ ID NO: 3681 - RNA, 44 nt, synthetic construct
  source 1..44: mol_type = other RNA
gccgggcaccatcaaagaaaatatcatctttggtgtctcctacg

SEQ ID NO: 3682 - RNA, 44 nt, synthetic construct
  source 1..44: mol_type = other RNA
gccgggcaccatcaaagaaaatatcatctttggtgtctcctatg

SEQ ID NO: 3683 - RNA, 44 nt, synthetic construct
  source 1..44: mol_type = other RNA
gccgggcaccatcaaagaaaatatcatctttggtgtctcgtacg

SEQ ID NO: 3684 - RNA, 44 nt, synthetic construct
  source 1..44: mol_type = other RNA
gccgggcaccatcaaagaaaatatcatctttggtgtctcgtatg

SEQ ID NO: 3685 - RNA, 44 nt, synthetic construct
  source 1..44: mol_type = other RNA
gccgggcaccatcaaagaaaatatcatctttggtgtctcttacg

SEQ ID NO: 3686 - RNA, 44 nt, synthetic construct
  source 1..44: mol_type = other RNA
gccgggcaccatcaaagaaaatatcatctttggtgtctcttatg

SEQ ID NO: 3687 - RNA, 44 nt, synthetic construct
  source 1..44: mol_type = other RNA
gccgggcaccatcaaagaaaatatcatctttggtgtttcatacg

SEQ ID NO: 3688 - RNA, 44 nt, synthetic construct
  source 1..44: mol_type = other RNA
gccgggcaccatcaaagaaaatatcatctttggtgtttcatatg

SEQ ID NO: 3689 - RNA, 44 nt, synthetic construct
  source 1..44: mol_type = other RNA
gccgggcaccatcaaagaaaatatcatctttggtgtttcctacg

SEQ ID NO: 3690 - RNA, 44 nt, synthetic construct
  source 1..44: mol_type = other RNA
gccgggcaccatcaaagaaaatatcatctttggtgtttcgtacg

SEQ ID NO: 3691 - RNA, 44 nt, synthetic construct
  source 1..44: mol_type = other RNA
gccgggcaccatcaaagaaaatatcatctttggtgtttcgtatg

SEQ ID NO: 3692 - RNA, 44 nt, synthetic construct
  source 1..44: mol_type = other RNA
gccgggcaccatcaaagaaaatatcatctttggtgtttcttacg

SEQ ID NO: 3693 - RNA, 44 nt, synthetic construct
  source 1..44: mol_type = other RNA
gccgggcaccatcaaagaaaatatcatctttggtgtttcttatg

SEQ ID NO: 3694 - RNA, 44 nt, synthetic construct
  source 1..44: mol_type = other RNA
gccgggcaccattaaagaaaatatcatctttggtgtctcatacg

SEQ ID NO: 3695 - RNA, 44 nt, synthetic construct
  source 1..44: mol_type = other RNA
gccgggcaccattaaagaaaatatcatctttggtgtctcatatg

SEQ ID NO: 3696 - RNA, 44 nt, synthetic construct
  source 1..44: mol_type = other RNA
gccgggcaccattaaagaaaatatcatctttggtgtctcctacg

SEQ ID NO: 3697 - RNA, 44 nt, synthetic construct
  source 1..44: mol_type = other RNA
gccgggcaccattaaagaaaatatcatctttggtgtctcgtacg

SEQ ID NO: 3698 - RNA, 44 nt, synthetic construct
  source 1..44: mol_type = other RNA
gccgggcaccattaaagaaaatatcatctttggtgtctcgtatg

SEQ ID NO: 3699 - RNA, 44 nt, synthetic construct
  source 1..44: mol_type = other RNA
gccgggcaccattaaagaaaatatcatctttggtgtctcttacg

SEQ ID NO: 3700 - RNA, 44 nt, synthetic construct
  source 1..44: mol_type = other RNA
gccggggaccatcaaagaaaatatcatctttggtgtctcatacg

SEQ ID NO: 3701 - RNA, 44 nt, synthetic construct
  source 1..44: mol_type = other RNA
gccggggaccatcaaagaaaatatcatctttggtgtctcatatg

SEQ ID NO: 3702 - RNA, 44 nt, synthetic construct
  source 1..44: mol_type = other RNA
gccggggaccatcaaagaaaatatcatctttggtgtctcctacg

SEQ ID NO: 3703 - RNA, 44 nt, synthetic construct
  source 1..44: mol_type = other RNA
gccggggaccatcaaagaaaatatcatctttggtgtctcctatg

SEQ ID NO: 3704 - RNA, 44 nt, synthetic construct
  source 1..44: mol_type = other RNA
gccggggaccatcaaagaaaatatcatctttggtgtctcgtacg

SEQ ID NO: 3705 - RNA, 44 nt, synthetic construct
  source 1..44: mol_type = other RNA
gccggggaccatcaaagaaaatatcatctttggtgtctcgtatg

SEQ ID NO: 3706 - RNA, 44 nt, synthetic construct
  source 1..44: mol_type = other RNA
gccggggaccatcaaagaaaatatcatctttggtgtctcttatg

SEQ ID NO: 3707 - RNA, 44 nt, synthetic construct
  source 1..44: mol_type = other RNA
gccggggaccatcaaagaaaatatcatctttggtgtttcgtacg

SEQ ID NO: 3708 - RNA, 44 nt, synthetic construct
  source 1..44: mol_type = other RNA
gccggggaccatcaaagaaaatatcatctttggtgtttcgtatg

SEQ ID NO: 3709 - RNA, 44 nt, synthetic construct
  source 1..44: mol_type = other RNA
gccggggaccatcaaagaaaatatcatctttggtgtttcttacg

SEQ ID NO: 3710 - RNA, 44 nt, synthetic construct
  source 1..44: mol_type = other RNA
gccggggaccatcaaagaaaatatcatctttggtgtttcttatg

SEQ ID NO: 3711 - RNA, 44 nt, synthetic construct
  source 1..44: mol_type = other RNA
gccggggaccattaaagaaaatatcatctttggtgtctcatacg

SEQ ID NO: 3712 - RNA, 44 nt, synthetic construct
  source 1..44: mol_type = other RNA
gccggggaccattaaagaaaatatcatctttggtgtctcatatg

SEQ ID NO: 3713 - RNA, 44 nt, synthetic construct
  source 1..44: mol_type = other RNA
gccggggaccattaaagaaaatatcatctttggtgtctcctacg

SEQ ID NO: 3714 - RNA, 44 nt, synthetic construct
  source 1..44: mol_type = other RNA
gccggggaccattaaagaaaatatcatctttggtgtctcctatg

SEQ ID NO: 3715 - RNA, 44 nt, synthetic construct
  source 1..44: mol_type = other RNA
gccggggaccattaaagaaaatatcatctttggtgtttcatacg

SEQ ID NO: 3716 - RNA, 44 nt, synthetic construct
  source 1..44: mol_type = other RNA
gccggggaccattaaagaaaatatcatctttggtgtttcatatg

SEQ ID NO: 3717 - RNA, 44 nt, synthetic construct
  source 1..44: mol_type = other RNA
gccggggaccattaaagaaaatatcatctttggtgtttcctacg

SEQ ID NO: 3718 - RNA, 44 nt, synthetic construct
  source 1..44: mol_type = other RNA
gccggggaccattaaagaaaatatcatctttggtgtttcgtacg

SEQ ID NO: 3719 - RNA, 44 nt, synthetic construct
  source 1..44: mol_type = other RNA
gccggggaccattaaagaaaatatcatctttggtgtttcgtatg

SEQ ID NO: 3720 - RNA, 44 nt, synthetic construct
  source 1..44: mol_type = other RNA
gccggggaccattaaagaaaatatcatctttggtgtttcttacg

SEQ ID NO: 3721 - RNA, 44 nt, synthetic construct
  source 1..44: mol_type = other RNA
gccggggaccattaaagaaaatatcatctttggtgtttcttatg

SEQ ID NO: 3722 - RNA, 47 nt, synthetic construct
  source 1..47: mol_type = other RNA
tatgccaggcaccattaaagagaatataatctttggtgtctcgtatg

SEQ ID NO: 3723 - RNA, 47 nt, synthetic construct
  source 1..47: mol_type = other RNA
tatgccaggcaccattaaagagaatatcatctttggtgtctcgtatg

SEQ ID NO: 3724 - RNA, 47 nt, synthetic construct
  source 1..47: mol_type = other RNA
tatgccaggcaccattaaagagaatattatctttggtgtctcgtatg

SEQ ID NO: 3725 - RNA, 47 nt, synthetic construct
  source 1..47: mol_type = other RNA
tatgcccggcaccatcaaagagaacatcatctttggggtgtcgtacg

SEQ ID NO: 3726 - RNA, 47 nt, synthetic construct
  source 1..47: mol_type = other RNA
tatgcccggcaccatcaaagagaacatcatctttggggtgtcgtatg

SEQ ID NO: 3727 - RNA, 47 nt, synthetic construct
  source 1..47: mol_type = other RNA
tatgcccggcaccatcaaagagaacattatctttggggtgtcgtacg

SEQ ID NO: 3728 - RNA, 47 nt, synthetic construct
  source 1..47: mol_type = other RNA
tatgcccggcaccatcaaagagaatataatctttggggtgtcgtacg

SEQ ID NO: 3729 - RNA, 47 nt, synthetic construct
  source 1..47: mol_type = other RNA
tatgcccggcaccatcaaagagaatatcatctttggggtgtcgtacg

SEQ ID NO: 3730 - RNA, 47 nt, synthetic construct
  source 1..47: mol_type = other RNA
tatgcccggcaccatcaaagagaatatcatctttggggtgtcgtatg

SEQ ID NO: 3731 - RNA, 47 nt, synthetic construct
  source 1..47: mol_type = other RNA
tatgcccggcaccatcaaggagaacataatctttggggtgtcgtacg

SEQ ID NO: 3732 - RNA, 47 nt, synthetic construct
  source 1..47: mol_type = other RNA
tatgcccggcaccatcaaggagaacatcatctttggggtgtcgtacg

SEQ ID NO: 3733 - RNA, 47 nt, synthetic construct
  source 1..47: mol_type = other RNA
tatgcccggcaccatcaaggagaacattatctttggggtgtcgtacg

SEQ ID NO: 3734 - RNA, 47 nt, synthetic construct
  source 1..47: mol_type = other RNA
tatgcccggcaccatcaaggagaacattatctttggggtgtcgtatg

SEQ ID NO: 3735 - RNA, 47 nt, synthetic construct
  source 1..47: mol_type = other RNA
tatgcccggcaccatcaaggagaatatcatctttggggtgtcgtacg

SEQ ID NO: 3736 - RNA, 47 nt, synthetic construct
  source 1..47: mol_type = other RNA
tatgcccggcaccatcaaggagaatatcatctttggggtgtcgtatg

SEQ ID NO: 3737 - RNA, 47 nt, synthetic construct
  source 1..47: mol_type = other RNA
tatgcctggaaccatcaaagaaaatatcatctttggtgtctcatacg

SEQ ID NO: 3738 - RNA, 47 nt, synthetic construct
  source 1..47: mol_type = other RNA
tatgcctggaaccatcaaagaaaatatcatctttggtgtctcatatg

SEQ ID NO: 3739 - RNA, 47 nt, synthetic construct
  source 1..47: mol_type = other RNA
tatgcctggaaccatcaaagaaaatatcatctttggtgtctcctacg

SEQ ID NO: 3740 - RNA, 47 nt, synthetic construct
  source 1..47: mol_type = other RNA
tatgcctggaaccatcaaagaaaatatcatctttggtgtctcctatg

SEQ ID NO: 3741 - RNA, 47 nt, synthetic construct
  source 1..47: mol_type = other RNA
tatgcctggaaccatcaaagaaaatatcatctttggtgtctcgtacg

SEQ ID NO: 3742 - RNA, 47 nt, synthetic construct
  source 1..47: mol_type = other RNA
tatgcctggaaccatcaaagaaaatatcatctttggtgtctcgtatg

SEQ ID NO: 3743 - RNA, 47 nt, synthetic construct
  source 1..47: mol_type = other RNA
tatgcctggaaccatcaaagaaaatatcatctttggtgtttcatacg

SEQ ID NO: 3744 - RNA, 47 nt, synthetic construct
  source 1..47: mol_type = other RNA
tatgcctggaaccatcaaagaaaatatcatctttggtgtttcatatg

SEQ ID NO: 3745 - RNA, 47 nt, synthetic construct
  source 1..47: mol_type = other RNA
tatgcctggaaccatcaaagaaaatatcatctttggtgtttcctacg

SEQ ID NO: 3746 - RNA, 47 nt, synthetic construct
  source 1..47: mol_type = other RNA
tatgcctggaaccatcaaagaaaatatcatctttggtgtttcctatg

SEQ ID NO: 3747 - RNA, 47 nt, synthetic construct
  source 1..47: mol_type = other RNA
tatgcctggaaccatcaaagaaaatatcatctttggtgtttcgtacg

SEQ ID NO: 3748 - RNA, 47 nt, synthetic construct
  source 1..47: mol_type = other RNA
tatgcctggaaccatcaaagaaaatatcatctttggtgtttcgtatg

SEQ ID NO: 3749 - RNA, 47 nt, synthetic construct
  source 1..47: mol_type = other RNA
tatgcctggaaccatcaaagagaatatcatctttggtgtctcatacg

SEQ ID NO: 3750 - RNA, 47 nt, synthetic construct
  source 1..47: mol_type = other RNA
tatgcctggaaccatcaaagagaatatcatctttggtgtctcatatg

SEQ ID NO: 3751 - RNA, 47 nt, synthetic construct
  source 1..47: mol_type = other RNA
tatgcctggaaccatcaaagagaatatcatctttggtgtctcctacg

SEQ ID NO: 3752 - RNA, 47 nt, synthetic construct
  source 1..47: mol_type = other RNA
tatgcctggaaccatcaaagagaatatcatctttggtgtctcctatg

SEQ ID NO: 3753 - RNA, 47 nt, synthetic construct
  source 1..47: mol_type = other RNA
tatgcctggaaccatcaaagagaatatcatctttggtgtctcgtacg

SEQ ID NO: 3754 - RNA, 47 nt, synthetic construct
  source 1..47: mol_type = other RNA
tatgcctggaaccatcaaagagaatatcatctttggtgtctcgtatg

SEQ ID NO: 3755 - RNA, 47 nt, synthetic construct
  source 1..47: mol_type = other RNA
tatgcctggaaccatcaaagagaatatcatctttggtgtttcatacg

SEQ ID NO: 3756 - RNA, 47 nt, synthetic construct
  source 1..47: mol_type = other RNA
tatgcctggaaccatcaaagagaatatcatctttggtgtttcatatg

SEQ ID NO: 3757 - RNA, 47 nt, synthetic construct
  source 1..47: mol_type = other RNA
tatgcctggaaccatcaaagagaatatcatctttggtgtttcctacg

SEQ ID NO: 3758 - RNA, 47 nt, synthetic construct
  source 1..47: mol_type = other RNA
tatgcctggaaccatcaaagagaatatcatctttggtgtttcctatg

SEQ ID NO: 3759 - RNA, 47 nt, synthetic construct
  source 1..47: mol_type = other RNA
tatgcctggaaccatcaaagagaatatcatctttggtgtttcgtacg

SEQ ID NO: 3760 - RNA, 47 nt, synthetic construct
  source 1..47: mol_type = other RNA
tatgcctggaaccatcaaagagaatatcatctttggtgtttcgtatg

SEQ ID NO: 3761 - RNA, 47 nt, synthetic construct
  source 1..47: mol_type = other RNA
tatgcctggaaccattaaagaaaatatcatctttggtgtctcatacg

SEQ ID NO: 3762 - RNA, 47 nt, synthetic construct
  source 1..47: mol_type = other RNA
tatgcctggaaccattaaagaaaatatcatctttggtgtctcatatg

SEQ ID NO: 3763 - RNA, 47 nt, synthetic construct
  source 1..47: mol_type = other RNA
tatgcctggaaccattaaagaaaatatcatctttggtgtctcctacg

SEQ ID NO: 3764 - RNA, 47 nt, synthetic construct
  source 1..47: mol_type = other RNA
tatgcctggaaccattaaagaaaatatcatctttggtgtctcctatg

SEQ ID NO: 3765 - RNA, 47 nt, synthetic construct
  source 1..47: mol_type = other RNA
tatgcctggaaccattaaagaaaatatcatctttggtgtctcgtacg

SEQ ID NO: 3766 - RNA, 47 nt, synthetic construct
  source 1..47: mol_type = other RNA
tatgcctggaaccattaaagaaaatatcatctttggtgtctcgtatg

SEQ ID NO: 3767 - RNA, 47 nt, synthetic construct
  source 1..47: mol_type = other RNA
tatgcctggaaccattaaagaaaatatcatctttggtgtttcatacg

SEQ ID NO: 3768 - RNA, 47 nt, synthetic construct
  source 1..47: mol_type = other RNA
tatgcctggaaccattaaagaaaatatcatctttggtgtttcatatg

SEQ ID NO: 3769 - RNA, 47 nt, synthetic construct
  source 1..47: mol_type = other RNA
tatgcctggaaccattaaagaaaatatcatctttggtgtttcctacg

SEQ ID NO: 3770 - RNA, 47 nt, synthetic construct
  source 1..47: mol_type = other RNA
tatgcctggaaccattaaagaaaatatcatctttggtgtttcgtacg

SEQ ID NO: 3771 - RNA, 47 nt, synthetic construct
  source 1..47: mol_type = other RNA
tatgcctggaaccattaaagaaaatatcatctttggtgtttcgtatg

SEQ ID NO: 3772 - RNA, 47 nt, synthetic construct
  source 1..47: mol_type = other RNA
tatgcctggaaccattaaagagaatatcatctttggtgtctcatacg

SEQ ID NO: 3773 - RNA, 47 nt, synthetic construct
  source 1..47: mol_type = other RNA
tatgcctggaaccattaaagagaatatcatctttggtgtctcatatg

SEQ ID NO: 3774 - RNA, 47 nt, synthetic construct
  source 1..47: mol_type = other RNA
tatgcctggaaccattaaagagaatatcatctttggtgtctcctacg

SEQ ID NO: 3775 - RNA, 47 nt, synthetic construct
  source 1..47: mol_type = other RNA
tatgcctggaaccattaaagagaatatcatctttggtgtctcctatg

SEQ ID NO: 3776 - RNA, 47 nt, synthetic construct
  source 1..47: mol_type = other RNA
tatgcctggaaccattaaagagaatatcatctttggtgtctcgtacg

SEQ ID NO: 3777 - RNA, 47 nt, synthetic construct
  source 1..47: mol_type = other RNA
tatgcctggaaccattaaagagaatatcatctttggtgtttcatacg

SEQ ID NO: 3778 - RNA, 47 nt, synthetic construct
  source 1..47: mol_type = other RNA
tatgcctggaaccattaaagagaatatcatctttggtgtttcatatg

SEQ ID NO: 3779 - RNA, 47 nt, synthetic construct
  source 1..47: mol_type = other RNA
tatgcctggaaccattaaagagaatatcatctttggtgtttcctacg

SEQ ID NO: 3780 - RNA, 47 nt, synthetic construct
  source 1..47: mol_type = other RNA
tatgcctggaaccattaaagagaatatcatctttggtgtttcctatg

SEQ ID NO: 3781 - RNA, 47 nt, synthetic construct
  source 1..47: mol_type = other RNA
tatgcctggaaccattaaagagaatatcatctttggtgtttcgtacg

SEQ ID NO: 3782 - RNA, 47 nt, synthetic construct
  source 1..47: mol_type = other RNA
tatgcctggaaccattaaagagaatatcatctttggtgtttcgtatg

SEQ ID NO: 3783 - RNA, 47 nt, synthetic construct
  source 1..47: mol_type = other RNA
tatgcctggcaccatcaaagaaaatatcatctttggtgtctcatacg

SEQ ID NO: 3784 - RNA, 47 nt, synthetic construct
  source 1..47: mol_type = other RNA
tatgcctggcaccatcaaagaaaatatcatctttggtgtctcatatg

SEQ ID NO: 3785 - RNA, 47 nt, synthetic construct
  source 1..47: mol_type = other RNA
tatgcctggcaccatcaaagaaaatatcatctttggtgtttcatacg

SEQ ID NO: 3786 - RNA, 47 nt, synthetic construct
  source 1..47: mol_type = other RNA
tatgcctggcaccatcaaagaaaatatcatctttggtgtttcatatg

SEQ ID NO: 3787 - RNA, 47 nt, synthetic construct
  source 1..47: mol_type = other RNA
tatgcctggcaccatcaaagagaatatcatctttggtgtctcatacg

SEQ ID NO: 3788 - RNA, 47 nt, synthetic construct
  source 1..47: mol_type = other RNA
tatgcctggcaccatcaaagagaatatcatctttggtgtctcatatg

SEQ ID NO: 3789 - RNA, 47 nt, synthetic construct
  source 1..47: mol_type = other RNA
tatgcctggcaccatcaaagagaatatcatctttggtgtttcatacg

SEQ ID NO: 3790 - RNA, 47 nt, synthetic construct
  source 1..47: mol_type = other RNA
tatgcctggcaccatcaaagagaatatcatctttggtgtttcatatg

SEQ ID NO: 3791 - RNA, 47 nt, synthetic construct
  source 1..47: mol_type = other RNA
tatgcctggcaccattaaagaaaatatcatctttggtgtctcatacg

SEQ ID NO: 3792 - RNA, 47 nt, synthetic construct
  source 1..47: mol_type = other RNA
tatgcctggcaccattaaagaaaatatcatctttggtgtttcatacg

SEQ ID NO: 3793 - RNA, 47 nt, synthetic construct
  source 1..47: mol_type = other RNA
tatgcctggcaccattaaagagaatatcatctttggtgtctcatacg

SEQ ID NO: 3794 - RNA, 47 nt, synthetic construct
  source 1..47: mol_type = other RNA
tatgcctggcaccattaaagagaatatcatctttggtgtctcatatg

SEQ ID NO: 3795 - RNA, 47 nt, synthetic construct
  source 1..47: mol_type = other RNA
tatgcctggcaccattaaagagaatatcatctttggtgtttcatacg

SEQ ID NO: 3796 - RNA, 47 nt, synthetic construct
  source 1..47: mol_type = other RNA
tatgcctggcaccattaaagagaatatcatctttggtgtttcatatg

SEQ ID NO: 3797 - RNA, 47 nt, synthetic construct
  source 1..47: mol_type = other RNA
tatgcctgggaccatcaaagaaaatatcatctttggtgtctcatacg

SEQ ID NO: 3798 - RNA, 47 nt, synthetic construct
  source 1..47: mol_type = other RNA
tatgcctgggaccatcaaagaaaatatcatctttggtgtctcatatg

SEQ ID NO: 3799 - RNA, 47 nt, synthetic construct
  source 1..47: mol_type = other RNA
tatgcctgggaccatcaaagaaaatatcatctttggtgtttcatatg

SEQ ID NO: 3800 - RNA, 47 nt, synthetic construct
  source 1..47: mol_type = other RNA
tatgcctgggaccatcaaagagaatatcatctttggtgtctcatacg

SEQ ID NO: 3801 - RNA, 47 nt, synthetic construct
  source 1..47: mol_type = other RNA
tatgcctgggaccatcaaagagaatatcatctttggtgtctcatatg

SEQ ID NO: 3802 - RNA, 47 nt, synthetic construct
  source 1..47: mol_type = other RNA
tatgcctgggaccatcaaagagaatatcatctttggtgtttcatatg

SEQ ID NO: 3803 - RNA, 47 nt, synthetic construct
  source 1..47: mol_type = other RNA
tatgcctgggaccattaaagaaaatatcatctttggtgtctcatacg

SEQ ID NO: 3804 - RNA, 47 nt, synthetic construct
  source 1..47: mol_type = other RNA
tatgcctgggaccattaaagaaaatatcatctttggtgtctcatatg

SEQ ID NO: 3805 - RNA, 47 nt, synthetic construct
  source 1..47: mol_type = other RNA
tatgcctgggaccattaaagaaaatatcatctttggtgtttcatacg

SEQ ID NO: 3806 - RNA, 47 nt, synthetic construct
  source 1..47: mol_type = other RNA
tatgcctgggaccattaaagaaaatatcatctttggtgtttcatatg

SEQ ID NO: 3807 - RNA, 47 nt, synthetic construct
  source 1..47: mol_type = other RNA
tatgcctgggaccattaaagagaatatcatctttggtgtctcatacg

SEQ ID NO: 3808 - RNA, 47 nt, synthetic construct
  source 1..47: mol_type = other RNA
tatgcctgggaccattaaagagaatatcatctttggtgtctcatatg

SEQ ID NO: 3809 - RNA, 47 nt, synthetic construct
  source 1..47: mol_type = other RNA
tatgcctgggaccattaaagagaatatcatctttggtgtttcatacg

SEQ ID NO: 3810 - RNA, 47 nt, synthetic construct
  source 1..47: mol_type = other RNA
tatgcctgggaccattaaagagaatatcatctttggtgtttcatatg

SEQ ID NO: 3811 - RNA, 194 nt, synthetic construct
  source 1..194: mol_type = other RNA
gtctgtatctatattcatcatgtttaagagcggggaaatccgcaagtttaaataaggctagtccgttatcagcgtgaaaacgcggcaccgagtcggtgcttaaagagaacatcatcttcggtgtctcatacgatgaatatagatactcaacgcggttctatctagttacgcgttaaaccaactagaattttttt

SEQ ID NO: 3812 - RNA, 194 nt, synthetic construct
  source 1..194: mol_type = other RNA
gtctgtatctatattcatcatgtttaagagcggggaaatccgcaagtttaaataaggctagtccgttatcagcgtgaaaacgcggcaccgagtcggtgcttaaagagaacatcatcttcggtgtctcttacgatgaatatagatactcaacgcggttctatctagttacgcgttaaaccaactagaattttttt

SEQ ID NO: 3813 - RNA, 194 nt, synthetic construct
  source 1..194: mol_type = other RNA
gtctgtatctatattcatcatgtttaagagcggggaaatccgcaagtttaaataaggctagtccgttatcagcgtgaaaacgcggcaccgagtcggtgcttaaagagaacatcatcttcggtgtctcttatgatgaatatagatactcaacgcggttctatctagttacgcgttaaaccaactagaattttttt

SEQ ID NO: 3814 - RNA, 194 nt, synthetic construct
  source 1..194: mol_type = other RNA
gtctgtatctatattcatcatgtttaagagcggggaaatccgcaagtttaaataaggctagtccgttatcagcgtgaaaacgcggcaccgagtcggtgcttaaagagaacatcatctttggtgtatcttacgatgaatatagatactcaacgcggttctatctagttacgcgttaaaccaactagaattttttt

SEQ ID NO: 3815 - RNA, 194 nt, synthetic construct
  source 1..194: mol_type = other RNA
gtctgtatctatattcatcatgtttaagagcggggaaatccgcaagtttaaataaggctagtccgttatcagcgtgaaaacgcggcaccgagtcggtgcttaaagagaacatcatctttggtgtctcatacgatgaatatagatactcaacgcggttctatctagttacgcgttaaaccaactagaattttttt

SEQ ID NO: 3816 - RNA, 194 nt, synthetic construct
  source 1..194: mol_type = other RNA
gtctgtatctatattcatcatgtttaagagcggggaaatccgcaagtttaaataaggctagtccgttatcagcgtgaaaacgcggcaccgagtcggtgcttaaagagaacatcatctttggtgtctcgtacgatgaatatagatactcaacgcggttctatctagttacgcgttaaaccaactagaattttttt

SEQ ID NO: 3817 - RNA, 194 nt, synthetic construct
  source 1..194: mol_type = other RNA
gtctgtatctatattcatcatgtttaagagcggggaaatccgcaagtttaaataaggctagtccgttatcagcgtgaaaacgcggcaccgagtcggtgcttaaagagaacatcatctttggtgtctcttacgatgaatatagatactcaacgcggttctatctagttacgcgttaaaccaactagaattttttt

SEQ ID NO: 3818 - RNA, 194 nt, synthetic construct
  source 1..194: mol_type = other RNA
gtctgtatctatattcatcatgtttaagagcggggaaatccgcaagtttaaataaggctagtccgttatcagcgtgaaaacgcggcaccgagtcggtgcttaaagagaacatcatctttggtgtctcttatgatgaatatagatactcaacgcggttctatctagttacgcgttaaaccaactagaattttttt

SEQ ID NO: 3819 - RNA, 194 nt, synthetic construct
  source 1..194: mol_type = other RNA
gtctgtatctatattcatcatgtttaagagcggggaaatccgcaagtttaaataaggctagtccgttatcagcgtgaaaacgcggcaccgagtcggtgcttaaagagaacatcatctttggtgtgtcttacgatgaatatagatactcaacgcggttctatctagttacgcgttaaaccaactagaattttttt

SEQ ID NO: 3820 - RNA, 194 nt, synthetic construct
  source 1..194: mol_type = other RNA
gtctgtatctatattcatcatgtttaagagcggggaaatccgcaagtttaaataaggctagtccgttatcagcgtgaaaacgcggcaccgagtcggtgcttaaagagaacatcatctttggtgtgtcttatgatgaatatagatactcaacgcggttctatctagttacgcgttaaaccaactagaattttttt

SEQ ID NO: 3821 - RNA, 194 nt, synthetic construct
  source 1..194: mol_type = other RNA
gtctgtatctatattcatcatgtttaagagcggggaaatccgcaagtttaaataaggctagtccgttatcagcgtgaaaacgcggcaccgagtcggtgcttaaagagaacatcatctttggtgttagctacgatgaatatagatactcaacgcggttctatctagttacgcgttaaaccaactagaattttttt

SEQ ID NO: 3822 - RNA, 194 nt, synthetic construct
  source 1..194: mol_type = other RNA
gtctgtatctatattcatcatgtttaagagcggggaaatccgcaagtttaaataaggctagtccgttatcagcgtgaaaacgcggcaccgagtcggtgcttaaagagaacatcatctttggtgtttcttacgatgaatatagatactcaacgcggttctatctagttacgcgttaaaccaactagaattttttt

SEQ ID NO: 3823 - RNA, 194 nt, synthetic construct
  source 1..194: mol_type = other RNA
gtctgtatctatattcatcatgtttaagagcggggaaatccgcaagtttaaataaggctagtccgttatcagcgtgaaaacgcggcaccgagtcggtgcttaaagagaacatcatctttggtgtttcttatgatgaatatagatactcaacgcggttctatctagttacgcgttaaaccaactagaattttttt

SEQ ID NO: 3824 - RNA, 194 nt, synthetic construct
  source 1..194: mol_type = other RNA
gtctgtatctatattcatcatgtttaagagcggggaaatccgcaagtttaaataaggctagtccgttatcagcgtgaaaacgcggcaccgagtcggtgcttaaagagaacattatctttggtgtctcttacgatgaatatagatactcaacgcggttctatctagttacgcgttaaaccaactagaattttttt

SEQ ID NO: 3825 - RNA, 194 nt, synthetic construct
  source 1..194: mol_type = other RNA
gtctgtatctatattcatcatgtttaagagcggggaaatccgcaagtttaaataaggctagtccgttatcagcgtgaaaacgcggcaccgagtcggtgcttaaagagaacattatctttggtgtctcttatgatgaatatagatactcaacgcggttctatctagttacgcgttaaaccaactagaattttttt

SEQ ID NO: 3826 - RNA, 194 nt, synthetic construct
  source 1..194: mol_type = other RNA
gtctgtatctatattcatcatgtttaagagcggggaaatccgcaagtttaaataaggctagtccgttatcagcgtgaaaacgcggcaccgagtcggtgcttaaagagaatatcatcttcggtgtctcttacgatgaatatagatactcaacgcggttctatctagttacgcgttaaaccaactagaattttttt

SEQ ID NO: 3827 - RNA, 194 nt, synthetic construct
  source 1..194: mol_type = other RNA
gtctgtatctatattcatcatgtttaagagcggggaaatccgcaagtttaaataaggctagtccgttatcagcgtgaaaacgcggcaccgagtcggtgcttaaagaaaacatcatcttcggtgtttcgtacgatgaatatagatactcaacgcggttctatctagttacgcgttaaaccaactagaattttttt

SEQ ID NO: 3828 - RNA, 194 nt, synthetic construct
  source 1..194: mol_type = other RNA
gtctgtatctatattcatcatgtttaagagcggggaaatccgcaagtttaaataaggctagtccgttatcagcgtgaaaacgcggcaccgagtcggtgcttaaagaaaacatcatcttcggtgtttcgtatgatgaatatagatactcaacgcggttctatctagttacgcgttaaaccaactagaattttttt

SEQ ID NO: 3829 - RNA, 194 nt, synthetic construct
  source 1..194: mol_type = other RNA
gtctgtatctatattcatcatgtttaagagcggggaaatccgcaagtttaaataaggctagtccgttatcagcgtgaaaacgcggcaccgagtcggtgcttaaagaaaatatcatctttggtgtttcctatgatgaatatagatactcaacgcggttctatctagttacgcgttaaaccaactagaattttttt

SEQ ID NO: 3830 - RNA, 194 nt, synthetic construct
  source 1..194: mol_type = other RNA
gtctgtatctatattcatcatgtttaagagcggggaaatccgcaagtttaaataaggctagtccgttatcagcgtgaaaacgcggcaccgagtcggtgctcaaagaaaacatcatcttcggtgtttcatacgatgaatatagatactcaacgcggttctatctagttacgcgttaaaccaactagaattttttt

SEQ ID NO: 3831 - RNA, 194 nt, synthetic construct
  source 1..194: mol_type = other RNA
gtctgtatctatattcatcatgtttaagagcggggaaatccgcaagtttaaataaggctagtccgttatcagcgtgaaaacgcggcaccgagtcggtgctcaaagaaaacatcatcttcggtgtttcatatgatgaatatagatactcaacgcggttctatctagttacgcgttaaaccaactagaattttttt

SEQ ID NO: 3832 - RNA, 194 nt, synthetic construct
  source 1..194: mol_type = other RNA
gtctgtatctatattcatcatgtttaagagcggggaaatccgcaagtttaaataaggctagtccgttatcagcgtgaaaacgcggcaccgagtcggtgctcaaagaaaacatcatcttcggtgtttcttacgatgaatatagatactcaacgcggttctatctagttacgcgttaaaccaactagaattttttt

SEQ ID NO: 3833 - RNA, 194 nt, synthetic construct
  source 1..194: mol_type = other RNA
gtctgtatctatattcatcatgtttaagagcggggaaatccgcaagtttaaataaggctagtccgttatcagcgtgaaaacgcggcaccgagtcggtgctcaaagaaaacatcatcttcggtgtttcttatgatgaatatagatactcaacgcggttctatctagttacgcgttaaaccaactagaattttttt

SEQ ID NO: 3834 - RNA, 194 nt, synthetic construct
  source 1..194: mol_type = other RNA
gtctgtatctatattcatcatgtttaagagcggggaaatccgcaagtttaaataaggctagtccgttatcagcgtgaaaacgcggcaccgagtcggtgctcaaagaaaacatcatctttggtgtttcatacgatgaatatagatactcaacgcggttctatctagttacgcgttaaaccaactagaattttttt

SEQ ID NO: 3835 - RNA, 194 nt, synthetic construct
  source 1..194: mol_type = other RNA
gtctgtatctatattcatcatgtttaagagcggggaaatccgcaagtttaaataaggctagtccgttatcagcgtgaaaacgcggcaccgagtcggtgctcaaagaaaacatcatctttggtgtttcatatgatgaatatagatactcaacgcggttctatctagttacgcgttaaaccaactagaattttttt

SEQ ID NO: 3836 - RNA, 194 nt, synthetic construct
  source 1..194: mol_type = other RNA
gtctgtatctatattcatcatgtttaagagcggggaaatccgcaagtttaaataaggctagtccgttatcagcgtgaaaacgcggcaccgagtcggtgctcaaagaaaacatcatctttggtgtttcttacgatgaatatagatactcaacgcggttctatctagttacgcgttaaaccaactagaattttttt

SEQ ID NO: 3837 - RNA, 194 nt, synthetic construct
  source 1..194: mol_type = other RNA
gtctgtatctatattcatcatgtttaagagcggggaaatccgcaagtttaaataaggctagtccgttatcagcgtgaaaacgcggcaccgagtcggtgctcaaagaaaacatcatctttggtgtttcttatgatgaatatagatactcaacgcggttctatctagttacgcgttaaaccaactagaattttttt

SEQ ID NO: 3838 - RNA, 194 nt, synthetic construct
  source 1..194: mol_type = other RNA
gtctgtatctatattcatcatgtttaagagcggggaaatccgcaagtttaaataaggctagtccgttatcagcgtgaaaacgcggcaccgagtcggtgctcaaagaaaatatcatcttcggtgtttcatacgatgaatatagatactcaacgcggttctatctagttacgcgttaaaccaactagaattttttt

SEQ ID NO: 3839 - RNA, 194 nt, synthetic construct
  source 1..194: mol_type = other RNA
gtctgtatctatattcatcatgtttaagagcggggaaatccgcaagtttaaataaggctagtccgttatcagcgtgaaaacgcggcaccgagtcggtgctcaaagaaaatatcatcttcggtgtttcatatgatgaatatagatactcaacgcggttctatctagttacgcgttaaaccaactagaattttttt

SEQ ID NO: 3840 - RNA, 194 nt, synthetic construct
  source 1..194: mol_type = other RNA
gtctgtatctatattcatcatgtttaagagcggggaaatccgcaagtttaaataaggctagtccgttatcagcgtgaaaacgcggcaccgagtcggtgctcaaagaaaatatcatcttcggtgtttcttacgatgaatatagatactcaacgcggttctatctagttacgcgttaaaccaactagaattttttt

SEQ ID NO: 3841 - RNA, 194 nt, synthetic construct
  source 1..194: mol_type = other RNA
gtctgtatctatattcatcatgtttaagagcggggaaatccgcaagtttaaataaggctagtccgttatcagcgtgaaaacgcggcaccgagtcggtgctcaaagaaaatatcatcttcggtgtttcttatgatgaatatagatactcaacgcggttctatctagttacgcgttaaaccaactagaattttttt

SEQ ID NO: 3842 - RNA, 194 nt, synthetic construct
  source 1..194: mol_type = other RNA
gtctgtatctatattcatcatgtttaagagcggggaaatccgcaagtttaaataaggctagtccgttatcagcgtgaaaacgcggcaccgagtcggtgctcaaagaaaatatcatctttggtgtttcatacgatgaatatagatactcaacgcggttctatctagttacgcgttaaaccaactagaattttttt

SEQ ID NO: 3843 - RNA, 194 nt, synthetic construct
  source 1..194: mol_type = other RNA
gtctgtatctatattcatcatgtttaagagcggggaaatccgcaagtttaaataaggctagtccgttatcagcgtgaaaacgcggcaccgagtcggtgctcaaagaaaatatcatctttggtgtttcatatgatgaatatagatactcaacgcggttctatctagttacgcgttaaaccaactagaattttttt

SEQ ID NO: 3844 - RNA, 194 nt, synthetic construct
  source 1..194: mol_type = other RNA
gtctgtatctatattcatcatgtttaagagcggggaaatccgcaagtttaaataaggctagtccgttatcagcgtgaaaacgcggcaccgagtcggtgctcaaagaaaatatcatctttggtgtttcttacgatgaatatagatactcaacgcggttctatctagttacgcgttaaaccaactagaattttttt

SEQ ID NO: 3845 - RNA, 194 nt, synthetic construct
  source 1..194: mol_type = other RNA
gtctgtatctatattcatcatgtttaagagcggggaaatccgcaagtttaaataaggctagtccgttatcagcgtgaaaacgcggcaccgagtcggtgctcaaagaaaatatcatctttggtgtttcttatgatgaatatagatactcaacgcggttctatctagttacgcgttaaaccaactagaattttttt

SEQ ID NO: 3846 - RNA, 194 nt, synthetic construct
  source 1..194: mol_type = other RNA
gtctgtatctatattcatcatgtttaagagcggggaaatccgcaagtttaaataaggctagtccgttatcagcgtgaaaacgcggcaccgagtcggtgctcaaggaaaacatcatcttcggtgtttcatacgatgaatatagatactcaacgcggttctatctagttacgcgttaaaccaactagaattttttt

SEQ ID NO: 3847 - RNA, 194 nt, synthetic construct
  source 1..194: mol_type = other RNA
gtctgtatctatattcatcatgtttaagagcggggaaatccgcaagtttaaataaggctagtccgttatcagcgtgaaaacgcggcaccgagtcggtgctcaaggaaaacatcatcttcggtgtttcatatgatgaatatagatactcaacgcggttctatctagttacgcgttaaaccaactagaattttttt

SEQ ID NO: 3848 - RNA, 194 nt, synthetic construct
  source 1..194: mol_type = other RNA
gtctgtatctatattcatcatgtttaagagcggggaaatccgcaagtttaaataaggctagtccgttatcagcgtgaaaacgcggcaccgagtcggtgctcaaggaaaacatcatcttcggtgtttcttacgatgaatatagatactcaacgcggttctatctagttacgcgttaaaccaactagaattttttt

SEQ ID NO: 3849 - RNA, 194 nt, synthetic construct
  source 1..194: mol_type = other RNA
gtctgtatctatattcatcatgtttaagagcggggaaatccgcaagtttaaataaggctagtccgttatcagcgtgaaaacgcggcaccgagtcggtgctcaaggaaaacatcatcttcggtgtttcttatgatgaatatagatactcaacgcggttctatctagttacgcgttaaaccaactagaattttttt

SEQ ID NO: 3850 - RNA, 194 nt, synthetic construct
  source 1..194: mol_type = other RNA
gtctgtatctatattcatcatgtttaagagcggggaaatccgcaagtttaaataaggctagtccgttatcagcgtgaaaacgcggcaccgagtcggtgctcaaggaaaacatcatctttggtgtttcatacgatgaatatagatactcaacgcggttctatctagttacgcgttaaaccaactagaattttttt

SEQ ID NO: 3851 - RNA, 194 nt, synthetic construct
  source 1..194: mol_type = other RNA
gtctgtatctatattcatcatgtttaagagcggggaaatccgcaagtttaaataaggctagtccgttatcagcgtgaaaacgcggcaccgagtcggtgctcaaggaaaacatcatctttggtgtttcatatgatgaatatagatactcaacgcggttctatctagttacgcgttaaaccaactagaattttttt

SEQ ID NO: 3852 - RNA, 194 nt, synthetic construct
  source 1..194: mol_type = other RNA
gtctgtatctatattcatcatgtttaagagcggggaaatccgcaagtttaaataaggctagtccgttatcagcgtgaaaacgcggcaccgagtcggtgctcaaggaaaacatcatctttggtgtttcttacgatgaatatagatactcaacgcggttctatctagttacgcgttaaaccaactagaattttttt

SEQ ID NO: 3853 - RNA, 194 nt, synthetic construct
  source 1..194: mol_type = other RNA
gtctgtatctatattcatcatgtttaagagcggggaaatccgcaagtttaaataaggctagtccgttatcagcgtgaaaacgcggcaccgagtcggtgctcaaggaaaacatcatctttggtgtttcttatgatgaatatagatactcaacgcggttctatctagttacgcgttaaaccaactagaattttttt

SEQ ID NO: 3854 - RNA, 194 nt, synthetic construct
  source 1..194: mol_type = other RNA
gtctgtatctatattcatcatgtttaagagcggggaaatccgcaagtttaaataaggctagtccgttatcagcgtgaaaacgcggcaccgagtcggtgctcaaggaaaatatcatcttcggtgtttcatacgatgaatatagatactcaacgcggttctatctagttacgcgttaaaccaactagaattttttt

SEQ ID NO: 3855 - RNA, 194 nt, synthetic construct
  source 1..194: mol_type = other RNA
gtctgtatctatattcatcatgtttaagagcggggaaatccgcaagtttaaataaggctagtccgttatcagcgtgaaaacgcggcaccgagtcggtgctcaaggaaaatatcatcttcggtgtttcatatgatgaatatagatactcaacgcggttctatctagttacgcgttaaaccaactagaattttttt

SEQ ID NO: 3856 - RNA, 194 nt, synthetic construct
  source 1..194: mol_type = other RNA
gtctgtatctatattcatcatgtttaagagcggggaaatccgcaagtttaaataaggctagtccgttatcagcgtgaaaacgcggcaccgagtcggtgctcaaggaaaatatcatcttcggtgtttcttacgatgaatatagatactcaacgcggttctatctagttacgcgttaaaccaactagaattttttt

SEQ ID NO: 3857 - RNA, 194 nt, synthetic construct
  source 1..194: mol_type = other RNA
gtctgtatctatattcatcatgtttaagagcggggaaatccgcaagtttaaataaggctagtccgttatcagcgtgaaaacgcggcaccgagtcggtgctcaaggaaaatatcatcttcggtgtttcttatgatgaatatagatactcaacgcggttctatctagttacgcgttaaaccaactagaattttttt

SEQ ID NO: 3858 - RNA, 194 nt, synthetic construct
  source 1..194: mol_type = other RNA
gtctgtatctatattcatcatgtttaagagcggggaaatccgcaagtttaaataaggctagtccgttatcagcgtgaaaacgcggcaccgagtcggtgctcaaggaaaatatcatctttggtgtttcatacgatgaatatagatactcaacgcggttctatctagttacgcgttaaaccaactagaattttttt

SEQ ID NO: 3859 - RNA, 194 nt, synthetic construct
  source 1..194: mol_type = other RNA
gtctgtatctatattcatcatgtttaagagcggggaaatccgcaagtttaaataaggctagtccgttatcagcgtgaaaacgcggcaccgagtcggtgctcaaggaaaatatcatctttggtgtttcatatgatgaatatagatactcaacgcggttctatctagttacgcgttaaaccaactagaattttttt

SEQ ID NO: 3860 - RNA, 194 nt, synthetic construct
  source 1..194: mol_type = other RNA
gtctgtatctatattcatcatgtttaagagcggggaaatccgcaagtttaaataaggctagtccgttatcagcgtgaaaacgcggcaccgagtcggtgctcaaggaaaatatcatctttggtgtttcttacgatgaatatagatactcaacgcggttctatctagttacgcgttaaaccaactagaattttttt

SEQ ID NO: 3861 - RNA, 194 nt, synthetic construct
  source 1..194: mol_type = other RNA
gtctgtatctatattcatcatgtttaagagcggggaaatccgcaagtttaaataaggctagtccgttatcagcgtgaaaacgcggcaccgagtcggtgctcaaggaaaatatcatctttggtgtttcttatgatgaatatagatactcaacgcggttctatctagttacgcgttaaaccaactagaattttttt

SEQ ID NO: 3862 - RNA, 194 nt, synthetic construct
  source 1..194: mol_type = other RNA
gtctgtatctatattcatcatgtttaagagcggggaaatccgcaagtttaaataaggctagtccgttatcagcgtgaaaacgcggcaccgagtcggtgcttaaagaaaacatcatcttcggtgtttcatacgatgaatatagatactcaacgcggttctatctagttacgcgttaaaccaactagaattttttt

SEQ ID NO: 3863 - RNA, 194 nt, synthetic construct
  source 1..194: mol_type = other RNA
gtctgtatctatattcatcatgtttaagagcggggaaatccgcaagtttaaataaggctagtccgttatcagcgtgaaaacgcggcaccgagtcggtgcttaaagaaaacatcatcttcggtgtttcatatgatgaatatagatactcaacgcggttctatctagttacgcgttaaaccaactagaattttttt

SEQ ID NO: 3864 - RNA, 194 nt, synthetic construct
  source 1..194: mol_type = other RNA
gtctgtatctatattcatcatgtttaagagcggggaaatccgcaagtttaaataaggctagtccgttatcagcgtgaaaacgcggcaccgagtcggtgcttaaagaaaacatcatcttcggtgtttcttacgatgaatatagatactcaacgcggttctatctagttacgcgttaaaccaactagaattttttt

SEQ ID NO: 3865 - RNA, 194 nt, synthetic construct
  source 1..194: mol_type = other RNA
gtctgtatctatattcatcatgtttaagagcggggaaatccgcaagtttaaataaggctagtccgttatcagcgtgaaaacgcggcaccgagtcggtgcttaaagaaaacatcatcttcggtgtttcttatgatgaatatagatactcaacgcggttctatctagttacgcgttaaaccaactagaattttttt

SEQ ID NO: 3866 - RNA, 194 nt, synthetic construct
  source 1..194: mol_type = other RNA
gtctgtatctatattcatcatgtttaagagcggggaaatccgcaagtttaaataaggctagtccgttatcagcgtgaaaacgcggcaccgagtcggtgcttaaagaaaacatcatctttggtgtttcatacgatgaatatagatactcaacgcggttctatctagttacgcgttaaaccaactagaattttttt

SEQ ID NO: 3867 - RNA, 194 nt, synthetic construct
  source 1..194: mol_type = other RNA
gtctgtatctatattcatcatgtttaagagcggggaaatccgcaagtttaaataaggctagtccgttatcagcgtgaaaacgcggcaccgagtcggtgcttaaagaaaacatcatctttggtgtttcatatgatgaatatagatactcaacgcggttctatctagttacgcgttaaaccaactagaattttttt

SEQ ID NO: 3868 - RNA, 194 nt, synthetic construct
  source 1..194: mol_type = other RNA
gtctgtatctatattcatcatgtttaagagcggggaaatccgcaagtttaaataaggctagtccgttatcagcgtgaaaacgcggcaccgagtcggtgcttaaagaaaacatcatctttggtgtttcttacgatgaatatagatactcaacgcggttctatctagttacgcgttaaaccaactagaattttttt

SEQ ID NO: 3869 - RNA, 194 nt, synthetic construct
  source 1..194: mol_type = other RNA
gtctgtatctatattcatcatgtttaagagcggggaaatccgcaagtttaaataaggctagtccgttatcagcgtgaaaacgcggcaccgagtcggtgcttaaagaaaacatcatctttggtgtttcttatgatgaatatagatactcaacgcggttctatctagttacgcgttaaaccaactagaattttttt

SEQ ID NO: 3870 - RNA, 194 nt, synthetic construct
  source 1..194: mol_type = other RNA
gtctgtatctatattcatcatgtttaagagcggggaaatccgcaagtttaaataaggctagtccgttatcagcgtgaaaacgcggcaccgagtcggtgcttaaagaaaatatcatcttcggtgtttcatacgatgaatatagatactcaacgcggttctatctagttacgcgttaaaccaactagaattttttt

SEQ ID NO: 3871 - RNA, 194 nt, synthetic construct
  source 1..194: mol_type = other RNA
gtctgtatctatattcatcatgtttaagagcggggaaatccgcaagtttaaataaggctagtccgttatcagcgtgaaaacgcggcaccgagtcggtgcttaaagaaaatatcatcttcggtgtttcatatgatgaatatagatactcaacgcggttctatctagttacgcgttaaaccaactagaattttttt

SEQ ID NO: 3872 - RNA, 194 nt, synthetic construct
  source 1..194: mol_type = other RNA
gtctgtatctatattcatcatgtttaagagcggggaaatccgcaagtttaaataaggctagtccgttatcagcgtgaaaacgcggcaccgagtcggtgcttaaagaaaatatcatcttcggtgtttcttacgatgaatatagatactcaacgcggttctatctagttacgcgttaaaccaactagaattttttt

SEQ ID NO: 3873 - RNA, 194 nt, synthetic construct
  source 1..194: mol_type = other RNA
gtctgtatctatattcatcatgtttaagagcggggaaatccgcaagtttaaataaggctagtccgttatcagcgtgaaaacgcggcaccgagtcggtgcttaaagaaaatatcatcttcggtgtttcttatgatgaatatagatactcaacgcggttctatctagttacgcgttaaaccaactagaattttttt

SEQ ID NO: 3874 - RNA, 194 nt, synthetic construct
  source 1..194: mol_type = other RNA
gtctgtatctatattcatcatgtttaagagcggggaaatccgcaagtttaaataaggctagtccgttatcagcgtgaaaacgcggcaccgagtcggtgcttaaagaaaatatcatctttggtgtttcatacgatgaatatagatactcaacgcggttctatctagttacgcgttaaaccaactagaattttttt

SEQ ID NO: 3875 - RNA, 194 nt, synthetic construct
  source 1..194: mol_type = other RNA
gtctgtatctatattcatcatgtttaagagcggggaaatccgcaagtttaaataaggctagtccgttatcagcgtgaaaacgcggcaccgagtcggtgcttaaagaaaatatcatctttggtgtttcttacgatgaatatagatactcaacgcggttctatctagttacgcgttaaaccaactagaattttttt

SEQ ID NO: 3876 - RNA, 194 nt, synthetic construct
  source 1..194: mol_type = other RNA
gtctgtatctatattcatcatgtttaagagcggggaaatccgcaagtttaaataaggctagtccgttatcagcgtgaaaacgcggcaccgagtcggtgcttaaggaaaacatcatcttcggtgtttcttacgatgaatatagatactcaacgcggttctatctagttacgcgttaaaccaactagaattttttt

SEQ ID NO: 3877 - RNA, 194 nt, synthetic construct
  source 1..194: mol_type = other RNA
gtctgtatctatattcatcatgtttaagagcggggaaatccgcaagtttaaataaggctagtccgttatcagcgtgaaaacgcggcaccgagtcggtgcttaaggaaaacatcatcttcggtgtttcttatgatgaatatagatactcaacgcggttctatctagttacgcgttaaaccaactagaattttttt

SEQ ID NO: 3878 - RNA, 194 nt, synthetic construct
  source 1..194: mol_type = other RNA
gtctgtatctatattcatcatgtttaagagcggggaaatccgcaagtttaaataaggctagtccgttatcagcgtgaaaacgcggcaccgagtcggtgcttaaggaaaacatcatctttggtgtttcatacgatgaatatagatactcaacgcggttctatctagttacgcgttaaaccaactagaattttttt

SEQ ID NO: 3879 - RNA, 194 nt, synthetic construct
  source 1..194: mol_type = other RNA
gtctgtatctatattcatcatgtttaagagcggggaaatccgcaagtttaaataaggctagtccgttatcagcgtgaaaacgcggcaccgagtcggtgcttaaggaaaacatcatctttggtgtttcatatgatgaatatagatactcaacgcggttctatctagttacgcgttaaaccaactagaattttttt

SEQ ID NO: 3880 - RNA, 194 nt, synthetic construct
  source 1..194: mol_type = other RNA
gtctgtatctatattcatcatgtttaagagcggggaaatccgcaagtttaaataaggctagtccgttatcagcgtgaaaacgcggcaccgagtcggtgcttaaggaaaacatcatctttggtgtttcttacgatgaatatagatactcaacgcggttctatctagttacgcgttaaaccaactagaattttttt

SEQ ID NO: 3881 - RNA, 194 nt, synthetic construct
  source 1..194: mol_type = other RNA
gtctgtatctatattcatcatgtttaagagcggggaaatccgcaagtttaaataaggctagtccgttatcagcgtgaaaacgcggcaccgagtcggtgcttaaggaaaacatcatctttggtgtttcttatgatgaatatagatactcaacgcggttctatctagttacgcgttaaaccaactagaattttttt

SEQ ID NO: 3882 - RNA, 194 nt, synthetic construct
  source 1..194: mol_type = other RNA
gtctgtatctatattcatcatgtttaagagcggggaaatccgcaagtttaaataaggctagtccgttatcagcgtgaaaacgcggcaccgagtcggtgcttaaggaaaatatcatcttcggtgtttcatacgatgaatatagatactcaacgcggttctatctagttacgcgttaaaccaactagaattttttt

SEQ ID NO: 3883 - RNA, 194 nt, synthetic construct
  source 1..194: mol_type = other RNA
gtctgtatctatattcatcatgtttaagagcggggaaatccgcaagtttaaataaggctagtccgttatcagcgtgaaaacgcggcaccgagtcggtgcttaaggaaaatatcatcttcggtgtttcatatgatgaatatagatactcaacgcggttctatctagttacgcgttaaaccaactagaattttttt

SEQ ID NO: 3884 - RNA, 194 nt, synthetic construct
  source 1..194: mol_type = other RNA
gtctgtatctatattcatcatgtttaagagcggggaaatccgcaagtttaaataaggctagtccgttatcagcgtgaaaacgcggcaccgagtcggtgcttaaggaaaatatcatcttcggtgtttcttacgatgaatatagatactcaacgcggttctatctagttacgcgttaaaccaactagaattttttt

SEQ ID NO: 3885 - RNA, 194 nt, synthetic construct
  source 1..194: mol_type = other RNA
gtctgtatctatattcatcatgtttaagagcggggaaatccgcaagtttaaataaggctagtccgttatcagcgtgaaaacgcggcaccgagtcggtgcttaaggaaaatatcatcttcggtgtttcttatgatgaatatagatactcaacgcggttctatctagttacgcgttaaaccaactagaattttttt

SEQ ID NO: 3886 - RNA, 194 nt, synthetic construct
  source 1..194: mol_type = other RNA
gtctgtatctatattcatcatgtttaagagcggggaaatccgcaagtttaaataaggctagtccgttatcagcgtgaaaacgcggcaccgagtcggtgcttaaggaaaatatcatctttggtgtttcttacgatgaatatagatactcaacgcggttctatctagttacgcgttaaaccaactagaattttttt

SEQ ID NO: 3887 - RNA, 194 nt, synthetic construct
  source 1..194: mol_type = other RNA
gtctgtatctatattcatcatgtttaagagcggggaaatccgcaagtttaaataaggctagtccgttatcagcgtgaaaacgcggcaccgagtcggtgcttaaggaaaatatcatctttggtgtttcttatgatgaatatagatactcaacgcggttctatctagttacgcgttaaaccaactagaattttttt

SEQ ID NO: 3888 - RNA, 193 nt, synthetic construct
  source 1..193: mol_type = other RNA
gtctgtatctatattcatcatgtttaagagcggggaaatccgcaagtttaaataaggctagtccgttatcagcgtgaaaacgcggcaccgagtcggtgcattaaagagaacatcatcttcggtgtctcatacgatgaatatagatttcacgcggttctatctagttacgcgttaaaccaactagaattttttt

SEQ ID NO: 3889 - RNA, 193 nt, synthetic construct
  source 1..193: mol_type = other RNA
gtctgtatctatattcatcatgtttaagagcggggaaatccgcaagtttaaataaggctagtccgttatcagcgtgaaaacgcggcaccgagtcggtgcattaaagagaacatcatcttcggtgtctcttacgatgaatatagatttcacgcggttctatctagttacgcgttaaaccaactagaattttttt

SEQ ID NO: 3890 - RNA, 193 nt, synthetic construct
  source 1..193: mol_type = other RNA
gtctgtatctatattcatcatgtttaagagcggggaaatccgcaagtttaaataaggctagtccgttatcagcgtgaaaacgcggcaccgagtcggtgcattaaagagaacatcatcttcggtgtctcttatgatgaatatagatttcacgcggttctatctagttacgcgttaaaccaactagaattttttt

SEQ ID NO: 3891 - RNA, 193 nt, synthetic construct
  source 1..193: mol_type = other RNA
gtctgtatctatattcatcatgtttaagagcggggaaatccgcaagtttaaataaggctagtccgttatcagcgtgaaaacgcggcaccgagtcggtgcattaaagagaacatcatctttggagtctcttacgatgaatatagatttcacgcggttctatctagttacgcgttaaaccaactagaattttttt

SEQ ID NO: 3892 - RNA, 193 nt, synthetic construct
  source 1..193: mol_type = other RNA
gtctgtatctatattcatcatgtttaagagcggggaaatccgcaagtttaaataaggctagtccgttatcagcgtgaaaacgcggcaccgagtcggtgcattaaagagaacatcatctttggcgtctcttatgatgaatatagatttcacgcggttctatctagttacgcgttaaaccaactagaattttttt

SEQ ID NO: 3893 - RNA, 193 nt, synthetic construct
  source 1..193: mol_type = other RNA
gtctgtatctatattcatcatgtttaagagcggggaaatccgcaagtttaaataaggctagtccgttatcagcgtgaaaacgcggcaccgagtcggtgcattaaagagaacatcatctttggtgtctcatacgatgaatatagatttcacgcggttctatctagttacgcgttaaaccaactagaattttttt

SEQ ID NO: 3894 - RNA, 193 nt, synthetic construct
  source 1..193: mol_type = other RNA
gtctgtatctatattcatcatgtttaagagcggggaaatccgcaagtttaaataaggctagtccgttatcagcgtgaaaacgcggcaccgagtcggtgcattaaagagaacatcatctttggtgtctcgtacgatgaatatagatttcacgcggttctatctagttacgcgttaaaccaactagaattttttt

SEQ ID NO: 3895 - RNA, 193 nt, synthetic construct
  source 1..193: mol_type = other RNA
gtctgtatctatattcatcatgtttaagagcggggaaatccgcaagtttaaataaggctagtccgttatcagcgtgaaaacgcggcaccgagtcggtgcattaaagagaacatcatctttggtgtctcgtatgatgaatatagatttcacgcggttctatctagttacgcgttaaaccaactagaattttttt

SEQ ID NO: 3896 - RNA, 193 nt, synthetic construct
  source 1..193: mol_type = other RNA
gtctgtatctatattcatcatgtttaagagcggggaaatccgcaagtttaaataaggctagtccgttatcagcgtgaaaacgcggcaccgagtcggtgcattaaagagaacatcatctttggtgtctcttacgatgaatatagatttcacgcggttctatctagttacgcgttaaaccaactagaattttttt

SEQ ID NO: 3897 - RNA, 193 nt, synthetic construct
  source 1..193: mol_type = other RNA
gtctgtatctatattcatcatgtttaagagcggggaaatccgcaagtttaaataaggctagtccgttatcagcgtgaaaacgcggcaccgagtcggtgcattaaagagaacatcatctttggtgtctcttatgatgaatatagatttcacgcggttctatctagttacgcgttaaaccaactagaattttttt

SEQ ID NO: 3898 - RNA, 193 nt, synthetic construct
  source 1..193: mol_type = other RNA
gtctgtatctatattcatcatgtttaagagcggggaaatccgcaagtttaaataaggctagtccgttatcagcgtgaaaacgcggcaccgagtcggtgcattaaagagaacatcatctttggtgtgtcttacgatgaatatagatttcacgcggttctatctagttacgcgttaaaccaactagaattttttt

SEQ ID NO: 3899 - RNA, 193 nt, synthetic construct
  source 1..193: mol_type = other RNA
gtctgtatctatattcatcatgtttaagagcggggaaatccgcaagtttaaataaggctagtccgttatcagcgtgaaaacgcggcaccgagtcggtgcattaaagagaacatcatctttggtgtgtcttatgatgaatatagatttcacgcggttctatctagttacgcgttaaaccaactagaattttttt

SEQ ID NO: 3900 - RNA, 193 nt, synthetic construct
  source 1..193: mol_type = other RNA
gtctgtatctatattcatcatgtttaagagcggggaaatccgcaagtttaaataaggctagtccgttatcagcgtgaaaacgcggcaccgagtcggtgcattaaagagaacatcatctttggtgtttcttacgatgaatatagatttcacgcggttctatctagttacgcgttaaaccaactagaattttttt

SEQ ID NO: 3901 - RNA, 193 nt, synthetic construct
  source 1..193: mol_type = other RNA
gtctgtatctatattcatcatgtttaagagcggggaaatccgcaagtttaaataaggctagtccgttatcagcgtgaaaacgcggcaccgagtcggtgcattaaagagaacatcatctttggtgtttcttatgatgaatatagatttcacgcggttctatctagttacgcgttaaaccaactagaattttttt

SEQ ID NO: 3902 - RNA, 193 nt, synthetic construct
  source 1..193: mol_type = other RNA
gtctgtatctatattcatcatgtttaagagcggggaaatccgcaagtttaaataaggctagtccgttatcagcgtgaaaacgcggcaccgagtcggtgcattaaagagaacattatcttcggtgtctcttatgatgaatatagatttcacgcggttctatctagttacgcgttaaaccaactagaattttttt

SEQ ID NO: 3903 - RNA, 193 nt, synthetic construct
  source 1..193: mol_type = other RNA
gtctgtatctatattcatcatgtttaagagcggggaaatccgcaagtttaaataaggctagtccgttatcagcgtgaaaacgcggcaccgagtcggtgcattaaagagaacattatctttggtgtctcttacgatgaatatagatttcacgcggttctatctagttacgcgttaaaccaactagaattttttt

SEQ ID NO: 3904 - RNA, 193 nt, synthetic construct
  source 1..193: mol_type = other RNA
gtctgtatctatattcatcatgtttaagagcggggaaatccgcaagtttaaataaggctagtccgttatcagcgtgaaaacgcggcaccgagtcggtgcattaaagaaaacatcatctttggtgtttcatatgatgaatatagatttcacgcggttctatctagttacgcgttaaaccaactagaattttttt

SEQ ID NO: 3905 - RNA, 193 nt, synthetic construct
  source 1..193: mol_type = other RNA
gtctgtatctatattcatcatgtttaagagcggggaaatccgcaagtttaaataaggctagtccgttatcagcgtgaaaacgcggcaccgagtcggtgcattaaagaaaacatcatctttggtgtttcgtatgatgaatatagatttcacgcggttctatctagttacgcgttaaaccaactagaattttttt

SEQ ID NO: 3906 - RNA, 193 nt, synthetic construct
  source 1..193: mol_type = other RNA
gtctgtatctatattcatcatgtttaagagcggggaaatccgcaagtttaaataaggctagtccgttatcagcgtgaaaacgcggcaccgagtcggtgcattaaagaaaatatcatctttggtgtttcctatgatgaatatagatttcacgcggttctatctagttacgcgttaaaccaactagaattttttt

SEQ ID NO: 3907 - RNA, 193 nt, synthetic construct
  source 1..193: mol_type = other RNA
gtctgtatctatattcatcatgtttaagagcggggaaatccgcaagtttaaataaggctagtccgttatcagcgtgaaaacgcggcaccgagtcggtgcattaaagaaaacatcatctttggtgtttcgtacgatgaatatagatttcacgcggttctatctagttacgcgttaaaccaactagaattttttt

SEQ ID NO: 3908 - RNA, 193 nt, synthetic construct
  source 1..193: mol_type = other RNA
gtctgtatctatattcatcatgtttaagagcggggaaatccgcaagtttaaataaggctagtccgttatcagcgtgaaaacgcggcaccgagtcggtgcattaaggaaaacatcatctttggtgtttcctacgatgaatatagatttcacgcggttctatctagttacgcgttaaaccaactagaattttttt

SEQ ID NO: 3909 - RNA, 193 nt, synthetic construct
  source 1..193: mol_type = other RNA
gtctgtatctatattcatcatgtttaagagcggggaaatccgcaagtttaaataaggctagtccgttatcagcgtgaaaacgcggcaccgagtcggtgcattaaggaaaacatcatctttggtgtttcctatgatgaatatagatttcacgcggttctatctagttacgcgttaaaccaactagaattttttt

SEQ ID NO: 3910 - RNA, 193 nt, synthetic construct
  source 1..193: mol_type = other RNA
gtctgtatctatattcatcatgtttaagagcggggaaatccgcaagtttaaataaggctagtccgttatcagcgtgaaaacgcggcaccgagtcggtgcattaaggaaaacatcatctttggtgtttcgtacgatgaatatagatttcacgcggttctatctagttacgcgttaaaccaactagaattttttt

SEQ ID NO: 3911 - RNA, 193 nt, synthetic construct
  source 1..193: mol_type = other RNA
gtctgtatctatattcatcatgtttaagagcggggaaatccgcaagtttaaataaggctagtccgttatcagcgtgaaaacgcggcaccgagtcggtgcattaaggaaaacatcatctttggtgtttcgtatgatgaatatagatttcacgcggttctatctagttacgcgttaaaccaactagaattttttt

SEQ ID NO: 3912 - RNA, 193 nt, synthetic construct
  source 1..193: mol_type = other RNA
gtctgtatctatattcatcatgtttaagagcggggaaatccgcaagtttaaataaggctagtccgttatcagcgtgaaaacgcggcaccgagtcggtgcattaaggaaaatatcatctttggtgtttcctacgatgaatatagatttcacgcggttctatctagttacgcgttaaaccaactagaattttttt

SEQ ID NO: 3913 - RNA, 193 nt, synthetic construct
  source 1..193: mol_type = other RNA
gtctgtatctatattcatcatgtttaagagcggggaaatccgcaagtttaaataaggctagtccgttatcagcgtgaaaacgcggcaccgagtcggtgcattaaggaaaatatcatctttggtgtttcgtacgatgaatatagatttcacgcggttctatctagttacgcgttaaaccaactagaattttttt

SEQ ID NO: 3914 - RNA, 193 nt, synthetic construct
  source 1..193: mol_type = other RNA
gtctgtatctatattcatcatgtttaagagcggggaaatccgcaagtttaaataaggctagtccgttatcagcgtgaaaacgcggcaccgagtcggtgcattaaggaaaatatcatctttggtgtttcgtatgatgaatatagatttcacgcggttctatctagttacgcgttaaaccaactagaattttttt

SEQ ID NO: 3915 - RNA, 203 nt, synthetic construct
  source 1..203: mol_type = other RNA
gtctgtatctatattcatcatgtttaagagcggggaaatccgcaagtttaaataaggctagtccgttatcagcgtgaaaacgcggcaccgagtcggtgcgcctggcaccataaaggagaatatcatctttggtgtcagctacgatgaatatagattgatcgcggttctatctagttacgcgttaaaccaactagaattttttt

SEQ ID NO: 3916 - RNA, 203 nt, synthetic construct
  source 1..203: mol_type = other RNA
gtctgtatctatattcatcatgtttaagagcggggaaatccgcaagtttaaataaggctagtccgttatcagcgtgaaaacgcggcaccgagtcggtgcgcctggcaccataaaggagaatattatctttggtgtcagctacgatgaatatagattgatcgcggttctatctagttacgcgttaaaccaactagaattttttt

SEQ ID NO: 3917 - RNA, 203 nt, synthetic construct
  source 1..203: mol_type = other RNA
gtctgtatctatattcatcatgtttaagagcggggaaatccgcaagtttaaataaggctagtccgttatcagcgtgaaaacgcggcaccgagtcggtgcgcctggcaccatcaaagagaacatcatctttggtgtcagctacgatgaatatagattgatcgcggttctatctagttacgcgttaaaccaactagaattttttt

SEQ ID NO: 3918 - RNA, 203 nt, synthetic construct
  source 1..203: mol_type = other RNA
gtctgtatctatattcatcatgtttaagagcggggaaatccgcaagtttaaataaggctagtccgttatcagcgtgaaaacgcggcaccgagtcggtgcgcctggcaccatcaaagagaacatcatctttggtgtcagttacgatgaatatagattgatcgcggttctatctagttacgcgttaaaccaactagaattttttt

SEQ ID NO: 3919 - RNA, 203 nt, synthetic construct
  source 1..203: mol_type = other RNA
gtctgtatctatattcatcatgtttaagagcggggaaatccgcaagtttaaataaggctagtccgttatcagcgtgaaaacgcggcaccgagtcggtgcgcctggcaccatcaaagagaacattatctttggtgtcagctacgatgaatatagattgatcgcggttctatctagttacgcgttaaaccaactagaattttttt

SEQ ID NO: 3920 - RNA, 203 nt, synthetic construct
  source 1..203: mol_type = other RNA
gtctgtatctatattcatcatgtttaagagcggggaaatccgcaagtttaaataaggctagtccgttatcagcgtgaaaacgcggcaccgagtcggtgcgcctggcaccatcaaagagaatatcatctttggtgtcagttacgatgaatatagattgatcgcggttctatctagttacgcgttaaaccaactagaattttttt

SEQ ID NO: 3921 - RNA, 203 nt, synthetic construct
  source 1..203: mol_type = other RNA
gtctgtatctatattcatcatgtttaagagcggggaaatccgcaagtttaaataaggctagtccgttatcagcgtgaaaacgcggcaccgagtcggtgcgcctggcaccatcaaagagaatattatctttggtgtcagctacgatgaatatagattgatcgcggttctatctagttacgcgttaaaccaactagaattttttt

SEQ ID NO: 3922 - RNA, 203 nt, synthetic construct
  source 1..203: mol_type = other RNA
gtctgtatctatattcatcatgtttaagagcggggaaatccgcaagtttaaataaggctagtccgttatcagcgtgaaaacgcggcaccgagtcggtgcgcctggcaccatcaaagagaatattatctttggtgtcagttacgatgaatatagattgatcgcggttctatctagttacgcgttaaaccaactagaattttttt

SEQ ID NO: 3923 - RNA, 203 nt, synthetic construct
  source 1..203: mol_type = other RNA
gtctgtatctatattcatcatgtttaagagcggggaaatccgcaagtttaaataaggctagtccgttatcagcgtgaaaacgcggcaccgagtcggtgcgcctggcaccatcaaggagaacataatctttggtgtcagctacgatgaatatagattgatcgcggttctatctagttacgcgttaaaccaactagaattttttt

SEQ ID NO: 3924 - RNA, 203 nt, synthetic construct
  source 1..203: mol_type = other RNA
gtctgtatctatattcatcatgtttaagagcggggaaatccgcaagtttaaataaggctagtccgttatcagcgtgaaaacgcggcaccgagtcggtgcgcctggcaccatcaaggagaacatcatctttggtgtcagttacgatgaatatagattgatcgcggttctatctagttacgcgttaaaccaactagaattttttt

SEQ ID NO: 3925 - RNA, 203 nt, synthetic construct
  source 1..203: mol_type = other RNA
gtctgtatctatattcatcatgtttaagagcggggaaatccgcaagtttaaataaggctagtccgttatcagcgtgaaaacgcggcaccgagtcggtgcgcctggcaccatcaaggagaacattatctttggtgtcagctacgatgaatatagattgatcgcggttctatctagttacgcgttaaaccaactagaattttttt

SEQ ID NO: 3926 - RNA, 203 nt, synthetic construct
  source 1..203: mol_type = other RNA
gtctgtatctatattcatcatgtttaagagcggggaaatccgcaagtttaaataaggctagtccgttatcagcgtgaaaacgcggcaccgagtcggtgcgcctggcaccatcaaggagaatatcatctttggtgtcagctacgatgaatatagattgatcgcggttctatctagttacgcgttaaaccaactagaattttttt

SEQ ID NO: 3927 - RNA, 203 nt, synthetic construct
  source 1..203: mol_type = other RNA
gtctgtatctatattcatcatgtttaagagcggggaaatccgcaagtttaaataaggctagtccgttatcagcgtgaaaacgcggcaccgagtcggtgcgcctggcaccatcaaggagaatatcatctttggtgtcagttacgatgaatatagattgatcgcggttctatctagttacgcgttaaaccaactagaattttttt

SEQ ID NO: 3928 - RNA, 203 nt, synthetic construct
  source 1..203: mol_type = other RNA
gtctgtatctatattcatcatgtttaagagcggggaaatccgcaagtttaaataaggctagtccgttatcagcgtgaaaacgcggcaccgagtcggtgcgcctggcaccatcaaggagaatattatctttggtgtcagttacgatgaatatagattgatcgcggttctatctagttacgcgttaaaccaactagaattttttt

SEQ ID NO: 3929 - RNA, 203 nt, synthetic construct
  source 1..203: mol_type = other RNA
gtctgtatctatattcatcatgtttaagagcggggaaatccgcaagtttaaataaggctagtccgttatcagcgtgaaaacgcggcaccgagtcggtgcgcctggcaccattaaagagaacatcatctttggtgtcagctacgatgaatatagattgatcgcggttctatctagttacgcgttaaaccaactagaattttttt

SEQ ID NO: 3930 - RNA, 203 nt, synthetic construct
  source 1..203: mol_type = other RNA
gtctgtatctatattcatcatgtttaagagcggggaaatccgcaagtttaaataaggctagtccgttatcagcgtgaaaacgcggcaccgagtcggtgcgcctggcaccattaaagagaacatcatctttggtgtcagctatgatgaatatagattgatcgcggttctatctagttacgcgttaaaccaactagaattttttt

SEQ ID NO: 3931 - RNA, 203 nt, synthetic construct
  source 1..203: mol_type = other RNA
gtctgtatctatattcatcatgtttaagagcggggaaatccgcaagtttaaataaggctagtccgttatcagcgtgaaaacgcggcaccgagtcggtgcgcctggcaccatcaaagagaacatcatctttggtgttagctatgatgaatatagattgatcgcggttctatctagttacgcgttaaaccaactagaattttttt

SEQ ID NO: 3932 - RNA, 203 nt, synthetic construct
  source 1..203: mol_type = other RNA
gtctgtatctatattcatcatgtttaagagcggggaaatccgcaagtttaaataaggctagtccgttatcagcgtgaaaacgcggcaccgagtcggtgcgcctggcaccatcaaagagaacatcatctttggtgtttcgtatgatgaatatagattgatcgcggttctatctagttacgcgttaaaccaactagaattttttt

SEQ ID NO: 3933 - RNA, 203 nt, synthetic construct
  source 1..203: mol_type = other RNA
gtctgtatctatattcatcatgtttaagagcggggaaatccgcaagtttaaataaggctagtccgttatcagcgtgaaaacgcggcaccgagtcggtgcgcctggcaccattaaagaaaatatcatctttggtgtttcctatgatgaatatagattgatcgcggttctatctagttacgcgttaaaccaactagaattttttt

SEQ ID NO: 3934 - RNA, 203 nt, synthetic construct
  source 1..203: mol_type = other RNA
gtctgtatctatattcatcatgtttaagagcggggaaatccgcaagtttaaataaggctagtccgttatcagcgtgaaaacgcggcaccgagtcggtgcgccgggcaccatcaaagaaaatatcatctttggtgtctcatacgatgaatatagattgatcgcggttctatctagttacgcgttaaaccaactagaattttttt

SEQ ID NO: 3935 - RNA, 203 nt, synthetic construct
  source 1..203: mol_type = other RNA
gtctgtatctatattcatcatgtttaagagcggggaaatccgcaagtttaaataaggctagtccgttatcagcgtgaaaacgcggcaccgagtcggtgcgccgggcaccatcaaagaaaatatcatctttggtgtctcatatgatgaatatagattgatcgcggttctatctagttacgcgttaaaccaactagaattttttt

SEQ ID NO: 3936 - RNA, 203 nt, synthetic construct
  source 1..203: mol_type = other RNA
gtctgtatctatattcatcatgtttaagagcggggaaatccgcaagtttaaataaggctagtccgttatcagcgtgaaaacgcggcaccgagtcggtgcgccgggcaccatcaaagaaaatatcatctttggtgtctcctacgatgaatatagattgatcgcggttctatctagttacgcgttaaaccaactagaattttttt

SEQ ID NO: 3937 - RNA, 203 nt, synthetic construct
  source 1..203: mol_type = other RNA
gtctgtatctatattcatcatgtttaagagcggggaaatccgcaagtttaaataaggctagtccgttatcagcgtgaaaacgcggcaccgagtcggtgcgccgggcaccatcaaagaaaatatcatctttggtgtctcctatgatgaatatagattgatcgcggttctatctagttacgcgttaaaccaactagaattttttt

SEQ ID NO: 3938 - RNA, 203 nt, synthetic construct
  source 1..203: mol_type = other RNA
gtctgtatctatattcatcatgtttaagagcggggaaatccgcaagtttaaataaggctagtccgttatcagcgtgaaaacgcggcaccgagtcggtgcgccgggcaccatcaaagaaaatatcatctttggtgtctcgtacgatgaatatagattgatcgcggttctatctagttacgcgttaaaccaactagaattttttt

SEQ ID NO: 3939 - RNA, 203 nt, synthetic construct
  source 1..203: mol_type = other RNA
gtctgtatctatattcatcatgtttaagagcggggaaatccgcaagtttaaataaggctagtccgttatcagcgtgaaaacgcggcaccgagtcggtgcgccgggcaccatcaaagaaaatatcatctttggtgtctcgtatgatgaatatagattgatcgcggttctatctagttacgcgttaaaccaactagaattttttt

SEQ ID NO: 3940 - RNA, 203 nt, synthetic construct
  source 1..203: mol_type = other RNA
gtctgtatctatattcatcatgtttaagagcggggaaatccgcaagtttaaataaggctagtccgttatcagcgtgaaaacgcggcaccgagtcggtgcgccgggcaccatcaaagaaaatatcatctttggtgtctcttacgatgaatatagattgatcgcggttctatctagttacgcgttaaaccaactagaattttttt

SEQ ID NO: 3941 - RNA, 203 nt, synthetic construct
  source 1..203: mol_type = other RNA
gtctgtatctatattcatcatgtttaagagcggggaaatccgcaagtttaaataaggctagtccgttatcagcgtgaaaacgcggcaccgagtcggtgcgccgggcaccatcaaagaaaatatcatctttggtgtctcttatgatgaatatagattgatcgcggttctatctagttacgcgttaaaccaactagaattttttt

SEQ ID NO: 3942 - RNA, 203 nt, synthetic construct
  source 1..203: mol_type = other RNA
gtctgtatctatattcatcatgtttaagagcggggaaatccgcaagtttaaataaggctagtccgttatcagcgtgaaaacgcggcaccgagtcggtgcgccgggcaccatcaaagaaaatatcatctttggtgtttcatacgatgaatatagattgatcgcggttctatctagttacgcgttaaaccaactagaattttttt

SEQ ID NO: 3943 - RNA, 203 nt, synthetic construct
  source 1..203: mol_type = other RNA
gtctgtatctatattcatcatgtttaagagcggggaaatccgcaagtttaaataaggctagtccgttatcagcgtgaaaacgcggcaccgagtcggtgcgccgggcaccatcaaagaaaatatcatctttggtgtttcatatgatgaatatagattgatcgcggttctatctagttacgcgttaaaccaactagaattttttt

SEQ ID NO: 3944 - RNA, 203 nt, synthetic construct
  source 1..203: mol_type = other RNA
gtctgtatctatattcatcatgtttaagagcggggaaatccgcaagtttaaataaggctagtccgttatcagcgtgaaaacgcggcaccgagtcggtgcgccgggcaccatcaaagaaaatatcatctttggtgtttcctacgatgaatatagattgatcgcggttctatctagttacgcgttaaaccaactagaattttttt

SEQ ID NO: 3945 - RNA, 203 nt, synthetic construct
  source 1..203: mol_type = other RNA
gtctgtatctatattcatcatgtttaagagcggggaaatccgcaagtttaaataaggctagtccgttatcagcgtgaaaacgcggcaccgagtcggtgcgccgggcaccatcaaagaaaatatcatctttggtgtttcgtacgatgaatatagattgatcgcggttctatctagttacgcgttaaaccaactagaattttttt

SEQ ID NO: 3946 - RNA, 203 nt, synthetic construct
  source 1..203: mol_type = other RNA
gtctgtatctatattcatcatgtttaagagcggggaaatccgcaagtttaaataaggctagtccgttatcagcgtgaaaacgcggcaccgagtcggtgcgccgggcaccatcaaagaaaatatcatctttggtgtttcgtatgatgaatatagattgatcgcggttctatctagttacgcgttaaaccaactagaattttttt

SEQ ID NO: 3947 - RNA, 203 nt, synthetic construct
  source 1..203: mol_type = other RNA
gtctgtatctatattcatcatgtttaagagcggggaaatccgcaagtttaaataaggctagtccgttatcagcgtgaaaacgcggcaccgagtcggtgcgccgggcaccatcaaagaaaatatcatctttggtgtttcttacgatgaatatagattgatcgcggttctatctagttacgcgttaaaccaactagaattttttt

SEQ ID NO: 3948 - RNA, 203 nt, synthetic construct
  source 1..203: mol_type = other RNA
gtctgtatctatattcatcatgtttaagagcggggaaatccgcaagtttaaataaggctagtccgttatcagcgtgaaaacgcggcaccgagtcggtgcgccgggcaccatcaaagaaaatatcatctttggtgtttcttatgatgaatatagattgatcgcggttctatctagttacgcgttaaaccaactagaattttttt

SEQ ID NO: 3949 - RNA, 203 nt, synthetic construct
  source 1..203: mol_type = other RNA
gtctgtatctatattcatcatgtttaagagcggggaaatccgcaagtttaaataaggctagtccgttatcagcgtgaaaacgcggcaccgagtcggtgcgccgggcaccattaaagaaaatatcatctttggtgtctcatacgatgaatatagattgatcgcggttctatctagttacgcgttaaaccaactagaattttttt

SEQ ID NO: 3950 - RNA, 203 nt, synthetic construct
  source 1..203: mol_type = other RNA
gtctgtatctatattcatcatgtttaagagcggggaaatccgcaagtttaaataaggctagtccgttatcagcgtgaaaacgcggcaccgagtcggtgcgccgggcaccattaaagaaaatatcatctttggtgtctcatatgatgaatatagattgatcgcggttctatctagttacgcgttaaaccaactagaattttttt

SEQ ID NO: 3951 - RNA, 203 nt, synthetic construct
  source 1..203: mol_type = other RNA
gtctgtatctatattcatcatgtttaagagcggggaaatccgcaagtttaaataaggctagtccgttatcagcgtgaaaacgcggcaccgagtcggtgcgccgggcaccattaaagaaaatatcatctttggtgtctcctacgatgaatatagattgatcgcggttctatctagttacgcgttaaaccaactagaattttttt

SEQ ID NO: 3952 - RNA, 203 nt, synthetic construct
  source 1..203: mol_type = other RNA
gtctgtatctatattcatcatgtttaagagcggggaaatccgcaagtttaaataaggctagtccgttatcagcgtgaaaacgcggcaccgagtcggtgcgccgggcaccattaaagaaaatatcatctttggtgtctcgtacgatgaatatagattgatcgcggttctatctagttacgcgttaaaccaactagaattttttt

SEQ ID NO: 3953 - RNA, 203 nt, synthetic construct
  source 1..203: mol_type = other RNA
gtctgtatctatattcatcatgtttaagagcggggaaatccgcaagtttaaataaggctagtccgttatcagcgtgaaaacgcggcaccgagtcggtgcgccgggcaccattaaagaaaatatcatctttggtgtctcgtatgatgaatatagattgatcgcggttctatctagttacgcgttaaaccaactagaattttttt

SEQ ID NO: 3954 - RNA, 203 nt, synthetic construct
  source 1..203: mol_type = other RNA
gtctgtatctatattcatcatgtttaagagcggggaaatccgcaagtttaaataaggctagtccgttatcagcgtgaaaacgcggcaccgagtcggtgcgccgggcaccattaaagaaaatatcatctttggtgtctcttacgatgaatatagattgatcgcggttctatctagttacgcgttaaaccaactagaattttttt

SEQ ID NO: 3955 - RNA, 203 nt, synthetic construct
  source 1..203: mol_type = other RNA
gtctgtatctatattcatcatgtttaagagcggggaaatccgcaagtttaaataaggctagtccgttatcagcgtgaaaacgcggcaccgagtcggtgcgccggggaccatcaaagaaaatatcatctttggtgtctcatacgatgaatatagattgatcgcggttctatctagttacgcgttaaaccaactagaattttttt

SEQ ID NO: 3956 - RNA, 203 nt, synthetic construct
  source 1..203: mol_type = other RNA
gtctgtatctatattcatcatgtttaagagcggggaaatccgcaagtttaaataaggctagtccgttatcagcgtgaaaacgcggcaccgagtcggtgcgccggggaccatcaaagaaaatatcatctttggtgtctcatatgatgaatatagattgatcgcggttctatctagttacgcgttaaaccaactagaattttttt

SEQ ID NO: 3957 - RNA, 203 nt, synthetic construct
  source 1..203: mol_type = other RNA
gtctgtatctatattcatcatgtttaagagcggggaaatccgcaagtttaaataaggctagtccgttatcagcgtgaaaacgcggcaccgagtcggtgcgccggggaccatcaaagaaaatatcatctttggtgtctcctacgatgaatatagattgatcgcggttctatctagttacgcgttaaaccaactagaattttttt

SEQ ID NO: 3958 - RNA, 203 nt, synthetic construct
  source 1..203: mol_type = other RNA
gtctgtatctatattcatcatgtttaagagcggggaaatccgcaagtttaaataaggctagtccgttatcagcgtgaaaacgcggcaccgagtcggtgcgccggggaccatcaaagaaaatatcatctttggtgtctcctatgatgaatatagattgatcgcggttctatctagttacgcgttaaaccaactagaattttttt

SEQ ID NO: 3959 - RNA, 203 nt, synthetic construct
  source 1..203: mol_type = other RNA
gtctgtatctatattcatcatgtttaagagcggggaaatccgcaagtttaaataaggctagtccgttatcagcgtgaaaacgcggcaccgagtcggtgcgccggggaccatcaaagaaaatatcatctttggtgtctcgtacgatgaatatagattgatcgcggttctatctagttacgcgttaaaccaactagaattttttt

SEQ ID NO: 3960 - RNA, 203 nt, synthetic construct
  source 1..203: mol_type = other RNA
gtctgtatctatattcatcatgtttaagagcggggaaatccgcaagtttaaataaggctagtccgttatcagcgtgaaaacgcggcaccgagtcggtgcgccggggaccatcaaagaaaatatcatctttggtgtctcgtatgatgaatatagattgatcgcggttctatctagttacgcgttaaaccaactagaattttttt

SEQ ID NO: 3961 - RNA, 203 nt, synthetic construct
  source 1..203: mol_type = other RNA
gtctgtatctatattcatcatgtttaagagcggggaaatccgcaagtttaaataaggctagtccgttatcagcgtgaaaacgcggcaccgagtcggtgcgccggggaccatcaaagaaaatatcatctttggtgtctcttatgatgaatatagattgatcgcggttctatctagttacgcgttaaaccaactagaattttttt

SEQ ID NO: 3962 - RNA, 203 nt, synthetic construct
  source 1..203: mol_type = other RNA
gtctgtatctatattcatcatgtttaagagcggggaaatccgcaagtttaaataaggctagtccgttatcagcgtgaaaacgcggcaccgagtcggtgcgccggggaccatcaaagaaaatatcatctttggtgtttcgtacgatgaatatagattgatcgcggttctatctagttacgcgttaaaccaactagaattttttt

SEQ ID NO: 3963 - RNA, 203 nt, synthetic construct
  source 1..203: mol_type = other RNA
gtctgtatctatattcatcatgtttaagagcggggaaatccgcaagtttaaataaggctagtccgttatcagcgtgaaaacgcggcaccgagtcggtgcgccggggaccatcaaagaaaatatcatctttggtgtttcgtatgatgaatatagattgatcgcggttctatctagttacgcgttaaaccaactagaattttttt

SEQ ID NO: 3964 - RNA, 203 nt, synthetic construct
  source 1..203: mol_type = other RNA
gtctgtatctatattcatcatgtttaagagcggggaaatccgcaagtttaaataaggctagtccgttatcagcgtgaaaacgcggcaccgagtcggtgcgccggggaccatcaaagaaaatatcatctttggtgtttcttacgatgaatatagattgatcgcggttctatctagttacgcgttaaaccaactagaattttttt

SEQ ID NO: 3965 - RNA, 203 nt, synthetic construct
  source 1..203: mol_type = other RNA
gtctgtatctatattcatcatgtttaagagcggggaaatccgcaagtttaaataaggctagtccgttatcagcgtgaaaacgcggcaccgagtcggtgcgccggggaccatcaaagaaaatatcatctttggtgtttcttatgatgaatatagattgatcgcggttctatctagttacgcgttaaaccaactagaattttttt

SEQ ID NO: 3966 - RNA, 203 nt, synthetic construct
  source 1..203: mol_type = other RNA
gtctgtatctatattcatcatgtttaagagcggggaaatccgcaagtttaaataaggctagtccgttatcagcgtgaaaacgcggcaccgagtcggtgcgccggggaccattaaagaaaatatcatctttggtgtctcatacgatgaatatagattgatcgcggttctatctagttacgcgttaaaccaactagaattttttt

SEQ ID NO: 3967 - RNA, 203 nt, synthetic construct
  source 1..203: mol_type = other RNA
gtctgtatctatattcatcatgtttaagagcggggaaatccgcaagtttaaataaggctagtccgttatcagcgtgaaaacgcggcaccgagtcggtgcgccggggaccattaaagaaaatatcatctttggtgtctcatatgatgaatatagattgatcgcggttctatctagttacgcgttaaaccaactagaattttttt

SEQ ID NO: 3968 - RNA, 203 nt, synthetic construct
  source 1..203: mol_type = other RNA
gtctgtatctatattcatcatgtttaagagcggggaaatccgcaagtttaaataaggctagtccgttatcagcgtgaaaacgcggcaccgagtcggtgcgccggggaccattaaagaaaatatcatctttggtgtctcctacgatgaatatagattgatcgcggttctatctagttacgcgttaaaccaactagaattttttt

SEQ ID NO: 3969 - RNA, 203 nt, synthetic construct
  source 1..203: mol_type = other RNA
gtctgtatctatattcatcatgtttaagagcggggaaatccgcaagtttaaataaggctagtccgttatcagcgtgaaaacgcggcaccgagtcggtgcgccggggaccattaaagaaaatatcatctttggtgtctcctatgatgaatatagattgatcgcggttctatctagttacgcgttaaaccaactagaattttttt

SEQ ID NO: 3970 - RNA, 203 nt, synthetic construct
  source 1..203: mol_type = other RNA
gtctgtatctatattcatcatgtttaagagcggggaaatccgcaagtttaaataaggctagtccgttatcagcgtgaaaacgcggcaccgagtcggtgcgccggggaccattaaagaaaatatcatctttggtgtttcatacgatgaatatagattgatcgcggttctatctagttacgcgttaaaccaactagaattttttt

SEQ ID NO: 3971 - RNA, 203 nt, synthetic construct
  source 1..203: mol_type = other RNA
gtctgtatctatattcatcatgtttaagagcggggaaatccgcaagtttaaataaggctagtccgttatcagcgtgaaaacgcggcaccgagtcggtgcgccggggaccattaaagaaaatatcatctttggtgtttcatatgatgaatatagattgatcgcggttctatctagttacgcgttaaaccaactagaattttttt

SEQ ID NO: 3972 - RNA, 203 nt, synthetic construct
  source 1..203: mol_type = other RNA
gtctgtatctatattcatcatgtttaagagcggggaaatccgcaagtttaaataaggctagtccgttatcagcgtgaaaacgcggcaccgagtcggtgcgccggggaccattaaagaaaatatcatctttggtgtttcctacgatgaatatagattgatcgcggttctatctagttacgcgttaaaccaactagaattttttt

SEQ ID NO: 3973 - RNA, 203 nt, synthetic construct
  source 1..203: mol_type = other RNA
gtctgtatctatattcatcatgtttaagagcggggaaatccgcaagtttaaataaggctagtccgttatcagcgtgaaaacgcggcaccgagtcggtgcgccggggaccattaaagaaaatatcatctttggtgtttcgtacgatgaatatagattgatcgcggttctatctagttacgcgttaaaccaactagaattttttt

SEQ ID NO: 3974 - RNA, 203 nt, synthetic construct
  source 1..203: mol_type = other RNA
gtctgtatctatattcatcatgtttaagagcggggaaatccgcaagtttaaataaggctagtccgttatcagcgtgaaaacgcggcaccgagtcggtgcgccggggaccattaaagaaaatatcatctttggtgtttcgtatgatgaatatagattgatcgcggttctatctagttacgcgttaaaccaactagaattttttt

SEQ ID NO: 3975 - RNA, 203 nt, synthetic construct
  source 1..203: mol_type = other RNA
gtctgtatctatattcatcatgtttaagagcggggaaatccgcaagtttaaataaggctagtccgttatcagcgtgaaaacgcggcaccgagtcggtgcgccggggaccattaaagaaaatatcatctttggtgtttcttacgatgaatatagattgatcgcggttctatctagttacgcgttaaaccaactagaattttttt

SEQ ID NO: 3976 - RNA, 203 nt, synthetic construct
  source 1..203: mol_type = other RNA
gtctgtatctatattcatcatgtttaagagcggggaaatccgcaagtttaaataaggctagtccgttatcagcgtgaaaacgcggcaccgagtcggtgcgccggggaccattaaagaaaatatcatctttggtgtttcttatgatgaatatagattgatcgcggttctatctagttacgcgttaaaccaactagaattttttt

SEQ ID NO: 3977 - RNA, 208 nt, synthetic construct
  source 1..208: mol_type = other RNA
gtctgtatctatattcatcatgtttaagagcggggaaatccgcaagtttaaataaggctagtccgttatcagcgtgaaaacgcggcaccgagtcggtgctatgccaggcaccattaaagagaatataatctttggtgtctcgtatgatgaatatagatactcaccgcggttctatctagttacgcgttaaaccaactagaattttttt

SEQ ID NO: 3978 - RNA, 208 nt, synthetic construct
  source 1..208: mol_type = other RNA
gtctgtatctatattcatcatgtttaagagcggggaaatccgcaagtttaaataaggctagtccgttatcagcgtgaaaacgcggcaccgagtcggtgctatgccaggcaccattaaagagaatatcatctttggtgtctcgtatgatgaatatagatactcaccgcggttctatctagttacgcgttaaaccaactagaattttttt

SEQ ID NO: 3979 - RNA, 208 nt, synthetic construct
  source 1..208: mol_type = other RNA
gtctgtatctatattcatcatgtttaagagcggggaaatccgcaagtttaaataaggctagtccgttatcagcgtgaaaacgcggcaccgagtcggtgctatgccaggcaccattaaagagaatattatctttggtgtctcgtatgatgaatatagatactcaccgcggttctatctagttacgcgttaaaccaactagaattttttt

SEQ ID NO: 3980 - RNA, 208 nt, synthetic construct
  source 1..208: mol_type = other RNA
gtctgtatctatattcatcatgtttaagagcggggaaatccgcaagtttaaataaggctagtccgttatcagcgtgaaaacgcggcaccgagtcggtgctatgcccggcaccatcaaagagaacatcatctttggggtgtcgtacgatgaatatagatactcaccgcggttctatctagttacgcgttaaaccaactagaattttttt

SEQ ID NO: 3981 - RNA, 208 nt, synthetic construct
  source 1..208: mol_type = other RNA
gtctgtatctatattcatcatgtttaagagcggggaaatccgcaagtttaaataaggctagtccgttatcagcgtgaaaacgcggcaccgagtcggtgctatgcccggcaccatcaaagagaacatcatctttggggtgtcgtatgatgaatatagatactcaccgcggttctatctagttacgcgttaaaccaactagaattttttt

SEQ ID NO: 3982 - RNA, 208 nt, synthetic construct
  source 1..208: mol_type = other RNA
gtctgtatctatattcatcatgtttaagagcggggaaatccgcaagtttaaataaggctagtccgttatcagcgtgaaaacgcggcaccgagtcggtgctatgcccggcaccatcaaagagaacattatctttggggtgtcgtacgatgaatatagatactcaccgcggttctatctagttacgcgttaaaccaactagaattttttt

SEQ ID NO: 3983 - RNA, 208 nt, synthetic construct
  source 1..208: mol_type = other RNA
gtctgtatctatattcatcatgtttaagagcggggaaatccgcaagtttaaataaggctagtccgttatcagcgtgaaaacgcggcaccgagtcggtgctatgcccggcaccatcaaagagaatataatctttggggtgtcgtacgatgaatatagatactcaccgcggttctatctagttacgcgttaaaccaactagaattttttt

SEQ ID NO: 3984 - RNA, 208 nt, synthetic construct
  source 1..208: mol_type = other RNA
gtctgtatctatattcatcatgtttaagagcggggaaatccgcaagtttaaataaggctagtccgttatcagcgtgaaaacgcggcaccgagtcggtgctatgcccggcaccatcaaagagaatatcatctttggggtgtcgtacgatgaatatagatactcaccgcggttctatctagttacgcgttaaaccaactagaattttttt

SEQ ID NO: 3985 - RNA, 208 nt, synthetic construct
  source 1..208: mol_type = other RNA
gtctgtatctatattcatcatgtttaagagcggggaaatccgcaagtttaaataaggctagtccgttatcagcgtgaaaacgcggcaccgagtcggtgctatgcccggcaccatcaaagagaatatcatctttggggtgtcgtatgatgaatatagatactcaccgcggttctatctagttacgcgttaaaccaactagaattttttt

SEQ ID NO: 3986 - RNA, 208 nt, synthetic construct
  source 1..208: mol_type = other RNA
gtctgtatctatattcatcatgtttaagagcggggaaatccgcaagtttaaataaggctagtccgttatcagcgtgaaaacgcggcaccgagtcggtgctatgcccggcaccatcaaggagaacataatctttggggtgtcgtacgatgaatatagatactcaccgcggttctatctagttacgcgttaaaccaactagaattttttt

SEQ ID NO: 3987 - RNA, 208 nt, synthetic construct
  source 1..208: mol_type = other RNA
gtctgtatctatattcatcatgtttaagagcggggaaatccgcaagtttaaataaggctagtccgttatcagcgtgaaaacgcggcaccgagtcggtgctatgcccggcaccatcaaggagaacatcatctttggggtgtcgtacgatgaatatagatactcaccgcggttctatctagttacgcgttaaaccaactagaattttttt

SEQ ID NO: 3988 - RNA, 208 nt, synthetic construct
  source 1..208: mol_type = other RNA
gtctgtatctatattcatcatgtttaagagcggggaaatccgcaagtttaaataaggctagtccgttatcagcgtgaaaacgcggcaccgagtcggtgctatgcccggcaccatcaaggagaacattatctttggggtgtcgtacgatgaatatagatactcaccgcggttctatctagttacgcgttaaaccaactagaattttttt

SEQ ID NO: 3989 - RNA, 208 nt, synthetic construct
  source 1..208: mol_type = other RNA
gtctgtatctatattcatcatgtttaagagcggggaaatccgcaagtttaaataaggctagtccgttatcagcgtgaaaacgcggcaccgagtcggtgctatgcccggcaccatcaaggagaacattatctttggggtgtcgtatgatgaatatagatactcaccgcggttctatctagttacgcgttaaaccaactagaattttttt

SEQ ID NO: 3990 - RNA, 208 nt, synthetic construct
  source 1..208: mol_type = other RNA
gtctgtatctatattcatcatgtttaagagcggggaaatccgcaagtttaaataaggctagtccgttatcagcgtgaaaacgcggcaccgagtcggtgctatgcccggcaccatcaaggagaatatcatctttggggtgtcgtacgatgaatatagatactcaccgcggttctatctagttacgcgttaaaccaactagaattttttt

SEQ ID NO: 3991 - RNA, 208 nt, synthetic construct
  source 1..208: mol_type = other RNA
gtctgtatctatattcatcatgtttaagagcggggaaatccgcaagtttaaataaggctagtccgttatcagcgtgaaaacgcggcaccgagtcggtgctatgcccggcaccatcaaggagaatatcatctttggggtgtcgtatgatgaatatagatactcaccgcggttctatctagttacgcgttaaaccaactagaattttttt

SEQ ID NO: 3992 - RNA, 208 nt, synthetic construct
  source 1..208: mol_type = other RNA
gtctgtatctatattcatcatgtttaagagcggggaaatccgcaagtttaaataaggctagtccgttatcagcgtgaaaacgcggcaccgagtcggtgctatgcctggcaccattaaagaaaatatcatctttggtgtttcctatgatgaatatagatactcaccgcggttctatctagttacgcgttaaaccaactagaattttttt

SEQ ID NO: 3993 - RNA, 208 nt, synthetic construct
  source 1..208: mol_type = other RNA
gtctgtatctatattcatcatgtttaagagcggggaaatccgcaagtttaaataaggctagtccgttatcagcgtgaaaacgcggcaccgagtcggtgctatgcctgggaccatcaaagaaaatatcatctttggtgtctcgtatgatgaatatagatactcaccgcggttctatctagttacgcgttaaaccaactagaattttttt

SEQ ID NO: 3994 - RNA, 208 nt, synthetic construct
  source 1..208: mol_type = other RNA
gtctgtatctatattcatcatgtttaagagcggggaaatccgcaagtttaaataaggctagtccgttatcagcgtgaaaacgcggcaccgagtcggtgctatgcctgggaccatcaaagagaatatcatctttggtgtctcgtacgatgaatatagatactcaccgcggttctatctagttacgcgttaaaccaactagaattttttt

SEQ ID NO: 3995 - RNA, 208 nt, synthetic construct
  source 1..208: mol_type = other RNA
gtctgtatctatattcatcatgtttaagagcggggaaatccgcaagtttaaataaggctagtccgttatcagcgtgaaaacgcggcaccgagtcggtgctatgcctggaaccatcaaagaaaatatcatctttggtgtctcatacgatgaatatagatactcaccgcggttctatctagttacgcgttaaaccaactagaattttttt

SEQ ID NO: 3996 - RNA, 208 nt, synthetic construct
  source 1..208: mol_type = other RNA
gtctgtatctatattcatcatgtttaagagcggggaaatccgcaagtttaaataaggctagtccgttatcagcgtgaaaacgcggcaccgagtcggtgctatgcctggaaccatcaaagaaaatatcatctttggtgtctcatatgatgaatatagatactcaccgcggttctatctagttacgcgttaaaccaactagaattttttt

SEQ ID NO: 3997 - RNA, 208 nt, synthetic construct
  source 1..208: mol_type = other RNA
gtctgtatctatattcatcatgtttaagagcggggaaatccgcaagtttaaataaggctagtccgttatcagcgtgaaaacgcggcaccgagtcggtgctatgcctggaaccatcaaagaaaatatcatctttggtgtctcctacgatgaatatagatactcaccgcggttctatctagttacgcgttaaaccaactagaattttttt

SEQ ID NO: 3998 - RNA, 208 nt, synthetic construct
  source 1..208: mol_type = other RNA
gtctgtatctatattcatcatgtttaagagcggggaaatccgcaagtttaaataaggctagtccgttatcagcgtgaaaacgcggcaccgagtcggtgctatgcctggaaccatcaaagaaaatatcatctttggtgtctcctatgatgaatatagatactcaccgcggttctatctagttacgcgttaaaccaactagaattttttt

SEQ ID NO: 3999 - RNA, 208 nt, synthetic construct
  source 1..208: mol_type = other RNA
gtctgtatctatattcatcatgtttaagagcggggaaatccgcaagtttaaataaggctagtccgttatcagcgtgaaaacgcggcaccgagtcggtgctatgcctggaaccatcaaagaaaatatcatctttggtgtctcgtacgatgaatatagatactcaccgcggttctatctagttacgcgttaaaccaactagaattttttt

SEQ ID NO: 4000 - RNA, 208 nt, synthetic construct
  source 1..208: mol_type = other RNA
gtctgtatctatattcatcatgtttaagagcggggaaatccgcaagtttaaataaggctagtccgttatcagcgtgaaaacgcggcaccgagtcggtgctatgcctggaaccatcaaagaaaatatcatctttggtgtctcgtatgatgaatatagatactcaccgcggttctatctagttacgcgttaaaccaactagaattttttt

SEQ ID NO: 4001 - RNA, 208 nt, synthetic construct
  source 1..208: mol_type = other RNA
gtctgtatctatattcatcatgtttaagagcggggaaatccgcaagtttaaataaggctagtccgttatcagcgtgaaaacgcggcaccgagtcggtgctatgcctggaaccatcaaagaaaatatcatctttggtgtttcatacgatgaatatagatactcaccgcggttctatctagttacgcgttaaaccaactagaattttttt

SEQ ID NO: 4002 - RNA, 208 nt, synthetic construct
  source 1..208: mol_type = other RNA
gtctgtatctatattcatcatgtttaagagcggggaaatccgcaagtttaaataaggctagtccgttatcagcgtgaaaacgcggcaccgagtcggtgctatgcctggaaccatcaaagaaaatatcatctttggtgtttcatatgatgaatatagatactcaccgcggttctatctagttacgcgttaaaccaactagaattttttt

SEQ ID NO: 4003 - RNA, 208 nt, synthetic construct
  source 1..208: mol_type = other RNA
gtctgtatctatattcatcatgtttaagagcggggaaatccgcaagtttaaataaggctagtccgttatcagcgtgaaaacgcggcaccgagtcggtgctatgcctggaaccatcaaagaaaatatcatctttggtgtttcctacgatgaatatagatactcaccgcggttctatctagttacgcgttaaaccaactagaattttttt

SEQ ID NO: 4004 - RNA, 208 nt, synthetic construct
  source 1..208: mol_type = other RNA
gtctgtatctatattcatcatgtttaagagcggggaaatccgcaagtttaaataaggctagtccgttatcagcgtgaaaacgcggcaccgagtcggtgctatgcctggaaccatcaaagaaaatatcatctttggtgtttcctatgatgaatatagatactcaccgcggttctatctagttacgcgttaaaccaactagaattttttt

SEQ ID NO: 4005 - RNA, 208 nt, synthetic construct
  source 1..208: mol_type = other RNA
gtctgtatctatattcatcatgtttaagagcggggaaatccgcaagtttaaataaggctagtccgttatcagcgtgaaaacgcggcaccgagtcggtgctatgcctggaaccatcaaagaaaatatcatctttggtgtttcgtacgatgaatatagatactcaccgcggttctatctagttacgcgttaaaccaactagaattttttt

SEQ ID NO: 4006 - RNA, 208 nt, synthetic construct
  source 1..208: mol_type = other RNA
gtctgtatctatattcatcatgtttaagagcggggaaatccgcaagtttaaataaggctagtccgttatcagcgtgaaaacgcggcaccgagtcggtgctatgcctggaaccatcaaagaaaatatcatctttggtgtttcgtatgatgaatatagatactcaccgcggttctatctagttacgcgttaaaccaactagaattttttt

SEQ ID NO: 4007 - RNA, 208 nt, synthetic construct
  source 1..208: mol_type = other RNA
gtctgtatctatattcatcatgtttaagagcggggaaatccgcaagtttaaataaggctagtccgttatcagcgtgaaaacgcggcaccgagtcggtgctatgcctggaaccatcaaagagaatatcatctttggtgtctcatacgatgaatatagatactcaccgcggttctatctagttacgcgttaaaccaactagaattttttt

SEQ ID NO: 4008 - RNA, 208 nt, synthetic construct
  source 1..208: mol_type = other RNA
gtctgtatctatattcatcatgtttaagagcggggaaatccgcaagtttaaataaggctagtccgttatcagcgtgaaaacgcggcaccgagtcggtgctatgcctggaaccatcaaagagaatatcatctttggtgtctcatatgatgaatatagatactcaccgcggttctatctagttacgcgttaaaccaactagaattttttt

SEQ ID NO: 4009 - RNA, 208 nt, synthetic construct
  source 1..208: mol_type = other RNA
gtctgtatctatattcatcatgtttaagagcggggaaatccgcaagtttaaataaggctagtccgttatcagcgtgaaaacgcggcaccgagtcggtgctatgcctggaaccatcaaagagaatatcatctttggtgtctcctacgatgaatatagatactcaccgcggttctatctagttacgcgttaaaccaactagaattttttt

SEQ ID NO: 4010 - RNA, 208 nt, synthetic construct
  source 1..208: mol_type = other RNA
gtctgtatctatattcatcatgtttaagagcggggaaatccgcaagtttaaataaggctagtccgttatcagcgtgaaaacgcggcaccgagtcggtgctatgcctggaaccatcaaagagaatatcatctttggtgtctcctatgatgaatatagatactcaccgcggttctatctagttacgcgttaaaccaactagaattttttt

SEQ ID NO: 4011 - RNA, 208 nt, synthetic construct
  source 1..208: mol_type = other RNA
gtctgtatctatattcatcatgtttaagagcggggaaatccgcaagtttaaataaggctagtccgttatcagcgtgaaaacgcggcaccgagtcggtgctatgcctggaaccatcaaagagaatatcatctttggtgtctcgtacgatgaatatagatactcaccgcggttctatctagttacgcgttaaaccaactagaattttttt

SEQ ID NO: 4012 - RNA, 208 nt, synthetic construct
  source 1..208: mol_type = other RNA
gtctgtatctatattcatcatgtttaagagcggggaaatccgcaagtttaaataaggctagtccgttatcagcgtgaaaacgcggcaccgagtcggtgctatgcctggaaccatcaaagagaatatcatctttggtgtctcgtatgatgaatatagatactcaccgcggttctatctagttacgcgttaaaccaactagaattttttt

SEQ ID NO: 4013 - RNA, 208 nt, synthetic construct
  source 1..208: mol_type = other RNA
gtctgtatctatattcatcatgtttaagagcggggaaatccgcaagtttaaataaggctagtccgttatcagcgtgaaaacgcggcaccgagtcggtgctatgcctggaaccatcaaagagaatatcatctttggtgtttcatacgatgaatatagatactcaccgcggttctatctagttacgcgttaaaccaactagaattttttt

SEQ ID NO: 4014 - RNA, 208 nt, synthetic construct
  source 1..208: mol_type = other RNA
gtctgtatctatattcatcatgtttaagagcggggaaatccgcaagtttaaataaggctagtccgttatcagcgtgaaaacgcggcaccgagtcggtgctatgcctggaaccatcaaagagaatatcatctttggtgtttcatatgatgaatatagatactcaccgcggttctatctagttacgcgttaaaccaactagaattttttt

SEQ ID NO: 4015 - RNA, 208 nt, synthetic construct
  source 1..208: mol_type = other RNA
gtctgtatctatattcatcatgtttaagagcggggaaatccgcaagtttaaataaggctagtccgttatcagcgtgaaaacgcggcaccgagtcggtgctatgcctggaaccatcaaagagaatatcatctttggtgtttcctacgatgaatatagatactcaccgcggttctatctagttacgcgttaaaccaactagaattttttt

SEQ ID NO: 4016 - RNA, 208 nt, synthetic construct
  source 1..208: mol_type = other RNA
gtctgtatctatattcatcatgtttaagagcggggaaatccgcaagtttaaataaggctagtccgttatcagcgtgaaaacgcggcaccgagtcggtgctatgcctggaaccatcaaagagaatatcatctttggtgtttcctatgatgaatatagatactcaccgcggttctatctagttacgcgttaaaccaactagaattttttt

SEQ ID NO: 4017 - RNA, 208 nt, synthetic construct
  source 1..208: mol_type = other RNA
gtctgtatctatattcatcatgtttaagagcggggaaatccgcaagtttaaataaggctagtccgttatcagcgtgaaaacgcggcaccgagtcggtgctatgcctggaaccatcaaagagaatatcatctttggtgtttcgtacgatgaatatagatactcaccgcggttctatctagttacgcgttaaaccaactagaattttttt

SEQ ID NO: 4018 - RNA, 208 nt, synthetic construct
  source 1..208: mol_type = other RNA
gtctgtatctatattcatcatgtttaagagcggggaaatccgcaagtttaaataaggctagtccgttatcagcgtgaaaacgcggcaccgagtcggtgctatgcctggaaccatcaaagagaatatcatctttggtgtttcgtatgatgaatatagatactcaccgcggttctatctagttacgcgttaaaccaactagaattttttt

SEQ ID NO: 4019 - RNA, 208 nt, synthetic construct
  source 1..208: mol_type = other RNA
gtctgtatctatattcatcatgtttaagagcggggaaatccgcaagtttaaataaggctagtccgttatcagcgtgaaaacgcggcaccgagtcggtgctatgcctggaaccattaaagaaaatatcatctttggtgtctcatacgatgaatatagatactcaccgcggttctatctagttacgcgttaaaccaactagaattttttt

SEQ ID NO: 4020 - RNA, 208 nt, synthetic construct
  source 1..208: mol_type = other RNA
gtctgtatctatattcatcatgtttaagagcggggaaatccgcaagtttaaataaggctagtccgttatcagcgtgaaaacgcggcaccgagtcggtgctatgcctggaaccattaaagaaaatatcatctttggtgtctcatatgatgaatatagatactcaccgcggttctatctagttacgcgttaaaccaactagaattttttt

SEQ ID NO: 4021 - RNA, 208 nt, synthetic construct
  source 1..208: mol_type = other RNA
gtctgtatctatattcatcatgtttaagagcggggaaatccgcaagtttaaataaggctagtccgttatcagcgtgaaaacgcggcaccgagtcggtgctatgcctggaaccattaaagaaaatatcatctttggtgtctcctacgatgaatatagatactcaccgcggttctatctagttacgcgttaaaccaactagaattttttt

SEQ ID NO: 4022 - RNA, 208 nt, synthetic construct
  source 1..208: mol_type = other RNA
gtctgtatctatattcatcatgtttaagagcggggaaatccgcaagtttaaataaggctagtccgttatcagcgtgaaaacgcggcaccgagtcggtgctatgcctggaaccattaaagaaaatatcatctttggtgtctcctatgatgaatatagatactcaccgcggttctatctagttacgcgttaaaccaactagaattttttt

SEQ ID NO: 4023 - RNA, 208 nt, synthetic construct
  source 1..208: mol_type = other RNA
gtctgtatctatattcatcatgtttaagagcggggaaatccgcaagtttaaataaggctagtccgttatcagcgtgaaaacgcggcaccgagtcggtgctatgcctggaaccattaaagaaaatatcatctttggtgtctcgtacgatgaatatagatactcaccgcggttctatctagttacgcgttaaaccaactagaattttttt

SEQ ID NO: 4024 - RNA, 208 nt, synthetic construct
  source 1..208: mol_type = other RNA
gtctgtatctatattcatcatgtttaagagcggggaaatccgcaagtttaaataaggctagtccgttatcagcgtgaaaacgcggcaccgagtcggtgctatgcctggaaccattaaagaaaatatcatctttggtgtctcgtatgatgaatatagatactcaccgcggttctatctagttacgcgttaaaccaactagaattttttt

SEQ ID NO: 4025 - RNA, 208 nt, synthetic construct
  source 1..208: mol_type = other RNA
gtctgtatctatattcatcatgtttaagagcggggaaatccgcaagtttaaataaggctagtccgttatcagcgtgaaaacgcggcaccgagtcggtgctatgcctggaaccattaaagaaaatatcatctttggtgtttcatacgatgaatatagatactcaccgcggttctatctagttacgcgttaaaccaactagaattttttt

SEQ ID NO: 4026 - RNA, 208 nt, synthetic construct
  source 1..208: mol_type = other RNA
gtctgtatctatattcatcatgtttaagagcggggaaatccgcaagtttaaataaggctagtccgttatcagcgtgaaaacgcggcaccgagtcggtgctatgcctggaaccattaaagaaaatatcatctttggtgtttcatatgatgaatatagatactcaccgcggttctatctagttacgcgttaaaccaactagaattttttt

SEQ ID NO: 4027 - RNA, 208 nt, synthetic construct
  source 1..208: mol_type = other RNA
gtctgtatctatattcatcatgtttaagagcggggaaatccgcaagtttaaataaggctagtccgttatcagcgtgaaaacgcggcaccgagtcggtgctatgcctggaaccattaaagaaaatatcatctttggtgtttcctacgatgaatatagatactcaccgcggttctatctagttacgcgttaaaccaactagaattttttt

SEQ ID NO: 4028 - RNA, 208 nt, synthetic construct
  source 1..208: mol_type = other RNA
gtctgtatctatattcatcatgtttaagagcggggaaatccgcaagtttaaataaggctagtccgttatcagcgtgaaaacgcggcaccgagtcggtgctatgcctggaaccattaaagaaaatatcatctttggtgtttcgtacgatgaatatagatactcaccgcggttctatctagttacgcgttaaaccaactagaattttttt

SEQ ID NO: 4029 - RNA, 208 nt, synthetic construct
  source 1..208: mol_type = other RNA
gtctgtatctatattcatcatgtttaagagcggggaaatccgcaagtttaaataaggctagtccgttatcagcgtgaaaacgcggcaccgagtcggtgctatgcctggaaccattaaagaaaatatcatctttggtgtttcgtatgatgaatatagatactcaccgcggttctatctagttacgcgttaaaccaactagaattttttt

SEQ ID NO: 4030 - RNA, 208 nt, synthetic construct
  source 1..208: mol_type = other RNA
gtctgtatctatattcatcatgtttaagagcggggaaatccgcaagtttaaataaggctagtccgttatcagcgtgaaaacgcggcaccgagtcggtgctatgcctggaaccattaaagagaatatcatctttggtgtctcatacgatgaatatagatactcaccgcggttctatctagttacgcgttaaaccaactagaattttttt

SEQ ID NO: 4031 - RNA, 208 nt, synthetic construct
  source 1..208: mol_type = other RNA
gtctgtatctatattcatcatgtttaagagcggggaaatccgcaagtttaaataaggctagtccgttatcagcgtgaaaacgcggcaccgagtcggtgctatgcctggaaccattaaagagaatatcatctttggtgtctcatatgatgaatatagatactcaccgcggttctatctagttacgcgttaaaccaactagaattttttt

SEQ ID NO: 4032 - RNA, 208 nt, synthetic construct
  source 1..208: mol_type = other RNA
gtctgtatctatattcatcatgtttaagagcggggaaatccgcaagtttaaataaggctagtccgttatcagcgtgaaaacgcggcaccgagtcggtgctatgcctggaaccattaaagagaatatcatctttggtgtctcctacgatgaatatagatactcaccgcggttctatctagttacgcgttaaaccaactagaattttttt

SEQ ID NO: 4033 - RNA, 208 nt, synthetic construct
  source 1..208: mol_type = other RNA
gtctgtatctatattcatcatgtttaagagcggggaaatccgcaagtttaaataaggctagtccgttatcagcgtgaaaacgcggcaccgagtcggtgctatgcctggaaccattaaagagaatatcatctttggtgtctcctatgatgaatatagatactcaccgcggttctatctagttacgcgttaaaccaactagaattttttt

SEQ ID NO: 4034 - RNA, 208 nt, synthetic construct
  source 1..208: mol_type = other RNA
gtctgtatctatattcatcatgtttaagagcggggaaatccgcaagtttaaataaggctagtccgttatcagcgtgaaaacgcggcaccgagtcggtgctatgcctggaaccattaaagagaatatcatctttggtgtctcgtacgatgaatatagatactcaccgcggttctatctagttacgcgttaaaccaactagaattttttt

SEQ ID NO: 4035 - RNA, 208 nt, synthetic construct
  source 1..208: mol_type = other RNA
gtctgtatctatattcatcatgtttaagagcggggaaatccgcaagtttaaataaggctagtccgttatcagcgtgaaaacgcggcaccgagtcggtgctatgcctggaaccattaaagagaatatcatctttggtgtttcatacgatgaatatagatactcaccgcggttctatctagttacgcgttaaaccaactagaattttttt

SEQ ID NO: 4036 - RNA, 208 nt, synthetic construct
  source 1..208: mol_type = other RNA
gtctgtatctatattcatcatgtttaagagcggggaaatccgcaagtttaaataaggctagtccgttatcagcgtgaaaacgcggcaccgagtcggtgctatgcctggaaccattaaagagaatatcatctttggtgtttcatatgatgaatatagatactcaccgcggttctatctagttacgcgttaaaccaactagaattttttt

SEQ ID NO: 4037 - RNA, 208 nt, synthetic construct
  source 1..208: mol_type = other RNA
gtctgtatctatattcatcatgtttaagagcggggaaatccgcaagtttaaataaggctagtccgttatcagcgtgaaaacgcggcaccgagtcggtgctatgcctggaaccattaaagagaatatcatctttggtgtttcctacgatgaatatagatactcaccgcggttctatctagttacgcgttaaaccaactagaattttttt

SEQ ID NO: 4038 - RNA, 208 nt, synthetic construct
  source 1..208: mol_type = other RNA
gtctgtatctatattcatcatgtttaagagcggggaaatccgcaagtttaaataaggctagtccgttatcagcgtgaaaacgcggcaccgagtcggtgctatgcctggaaccattaaagagaatatcatctttggtgtttcctatgatgaatatagatactcaccgcggttctatctagttacgcgttaaaccaactagaattttttt

SEQ ID NO: 4039 - RNA, 208 nt, synthetic construct
  source 1..208: mol_type = other RNA
gtctgtatctatattcatcatgtttaagagcggggaaatccgcaagtttaaataaggctagtccgttatcagcgtgaaaacgcggcaccgagtcggtgctatgcctggaaccattaaagagaatatcatctttggtgtttcgtacgatgaatatagatactcaccgcggttctatctagttacgcgttaaaccaactagaattttttt

SEQ ID NO: 4040 - RNA, 208 nt, synthetic construct
  source 1..208: mol_type = other RNA
gtctgtatctatattcatcatgtttaagagcggggaaatccgcaagtttaaataaggctagtccgttatcagcgtgaaaacgcggcaccgagtcggtgctatgcctggaaccattaaagagaatatcatctttggtgtttcgtatgatgaatatagatactcaccgcggttctatctagttacgcgttaaaccaactagaattttttt

SEQ ID NO: 4041 - RNA, 208 nt, synthetic construct
  source 1..208: mol_type = other RNA
gtctgtatctatattcatcatgtttaagagcggggaaatccgcaagtttaaataaggctagtccgttatcagcgtgaaaacgcggcaccgagtcggtgctatgcctggcaccatcaaagaaaatatcatctttggtgtctcatacgatgaatatagatactcaccgcggttctatctagttacgcgttaaaccaactagaattttttt

SEQ ID NO: 4042 - RNA, 208 nt, synthetic construct
  source 1..208: mol_type = other RNA
gtctgtatctatattcatcatgtttaagagcggggaaatccgcaagtttaaataaggctagtccgttatcagcgtgaaaacgcggcaccgagtcggtgctatgcctggcaccatcaaagaaaatatcatctttggtgtctcatatgatgaatatagatactcaccgcggttctatctagttacgcgttaaaccaactagaattttttt

SEQ ID NO: 4043 - RNA, 208 nt, synthetic construct
  source 1..208: mol_type = other RNA
gtctgtatctatattcatcatgtttaagagcggggaaatccgcaagtttaaataaggctagtccgttatcagcgtgaaaacgcggcaccgagtcggtgctatgcctggcaccatcaaagaaaatatcatctttggtgtttcatacgatgaatatagatactcaccgcggttctatctagttacgcgttaaaccaactagaattttttt

SEQ ID NO: 4044 - RNA, 208 nt, synthetic construct
  source 1..208: mol_type = other RNA
gtctgtatctatattcatcatgtttaagagcggggaaatccgcaagtttaaataaggctagtccgttatcagcgtgaaaacgcggcaccgagtcggtgctatgcctggcaccatcaaagaaaatatcatctttggtgtttcatatgatgaatatagatactcaccgcggttctatctagttacgcgttaaaccaactagaattttttt

SEQ ID NO: 4045 - RNA, 208 nt, synthetic construct
  source 1..208: mol_type = other RNA
gtctgtatctatattcatcatgtttaagagcggggaaatccgcaagtttaaataaggctagtccgttatcagcgtgaaaacgcggcaccgagtcggtgctatgcctggcaccatcaaagagaatatcatctttggtgtctcatacgatgaatatagatactcaccgcggttctatctagttacgcgttaaaccaactagaattttttt

SEQ ID NO: 4046 - RNA, 208 nt, synthetic construct
  source 1..208: mol_type = other RNA
gtctgtatctatattcatcatgtttaagagcggggaaatccgcaagtttaaataaggctagtccgttatcagcgtgaaaacgcggcaccgagtcggtgctatgcctggcaccatcaaagagaatatcatctttggtgtctcatatgatgaatatagatactcaccgcggttctatctagttacgcgttaaaccaactagaattttttt

SEQ ID NO: 4047 - RNA, 208 nt, synthetic construct
  source 1..208: mol_type = other RNA
gtctgtatctatattcatcatgtttaagagcggggaaatccgcaagtttaaataaggctagtccgttatcagcgtgaaaacgcggcaccgagtcggtgctatgcctggcaccatcaaagagaatatcatctttggtgtttcatacgatgaatatagatactcaccgcggttctatctagttacgcgttaaaccaactagaattttttt

SEQ ID NO: 4048 - RNA, 208 nt, synthetic construct
  source 1..208: mol_type = other RNA
gtctgtatctatattcatcatgtttaagagcggggaaatccgcaagtttaaataaggctagtccgttatcagcgtgaaaacgcggcaccgagtcggtgctatgcctggcaccatcaaagagaatatcatctttggtgtttcatatgatgaatatagatactcaccgcggttctatctagttacgcgttaaaccaactagaattttttt

SEQ ID NO: 4049 - RNA, 208 nt, synthetic construct
  source 1..208: mol_type = other RNA
gtctgtatctatattcatcatgtttaagagcggggaaatccgcaagtttaaataaggctagtccgttatcagcgtgaaaacgcggcaccgagtcggtgctatgcctggcaccattaaagaaaatatcatctttggtgtctcatacgatgaatatagatactcaccgcggttctatctagttacgcgttaaaccaactagaattttttt

SEQ ID NO: 4050 - RNA, 208 nt, synthetic construct
  source 1..208: mol_type = other RNA
gtctgtatctatattcatcatgtttaagagcggggaaatccgcaagtttaaataaggctagtccgttatcagcgtgaaaacgcggcaccgagtcggtgctatgcctggcaccattaaagaaaatatcatctttggtgtttcatacgatgaatatagatactcaccgcggttctatctagttacgcgttaaaccaactagaattttttt

SEQ ID NO: 4051 - RNA, 208 nt, synthetic construct
  source 1..208: mol_type = other RNA
gtctgtatctatattcatcatgtttaagagcggggaaatccgcaagtttaaataaggctagtccgttatcagcgtgaaaacgcggcaccgagtcggtgctatgcctggcaccattaaagagaatatcatctttggtgtctcatacgatgaatatagatactcaccgcggttctatctagttacgcgttaaaccaactagaattttttt

SEQ ID NO: 4052 - RNA, 208 nt, synthetic construct
  source 1..208: mol_type = other RNA
gtctgtatctatattcatcatgtttaagagcggggaaatccgcaagtttaaataaggctagtccgttatcagcgtgaaaacgcggcaccgagtcggtgctatgcctggcaccattaaagagaatatcatctttggtgtctcatatgatgaatatagatactcaccgcggttctatctagttacgcgttaaaccaactagaattttttt

SEQ ID NO: 4053 - RNA, 208 nt, synthetic construct
  source 1..208: mol_type = other RNA
gtctgtatctatattcatcatgtttaagagcggggaaatccgcaagtttaaataaggctagtccgttatcagcgtgaaaacgcggcaccgagtcggtgctatgcctggcaccattaaagagaatatcatctttggtgtttcatacgatgaatatagatactcaccgcggttctatctagttacgcgttaaaccaactagaattttttt

SEQ ID NO: 4054 - RNA, 208 nt, synthetic construct
  source 1..208: mol_type = other RNA
gtctgtatctatattcatcatgtttaagagcggggaaatccgcaagtttaaataaggctagtccgttatcagcgtgaaaacgcggcaccgagtcggtgctatgcctggcaccattaaagagaatatcatctttggtgtttcatatgatgaatatagatactcaccgcggttctatctagttacgcgttaaaccaactagaattttttt

SEQ ID NO: 4055 - RNA, 208 nt, synthetic construct
  source 1..208: mol_type = other RNA
gtctgtatctatattcatcatgtttaagagcggggaaatccgcaagtttaaataaggctagtccgttatcagcgtgaaaacgcggcaccgagtcggtgctatgcctgggaccatcaaagaaaatatcatctttggtgtctcatacgatgaatatagatactcaccgcggttctatctagttacgcgttaaaccaactagaattttttt

SEQ ID NO: 4056 - RNA, 208 nt, synthetic construct
  source 1..208: mol_type = other RNA
gtctgtatctatattcatcatgtttaagagcggggaaatccgcaagtttaaataaggctagtccgttatcagcgtgaaaacgcggcaccgagtcggtgctatgcctgggaccatcaaagaaaatatcatctttggtgtctcatatgatgaatatagatactcaccgcggttctatctagttacgcgttaaaccaactagaattttttt

SEQ ID NO: 4057 - RNA, 208 nt, synthetic construct
  source 1..208: mol_type = other RNA
gtctgtatctatattcatcatgtttaagagcggggaaatccgcaagtttaaataaggctagtccgttatcagcgtgaaaacgcggcaccgagtcggtgctatgcctgggaccatcaaagaaaatatcatctttggtgtttcatatgatgaatatagatactcaccgcggttctatctagttacgcgttaaaccaactagaattttttt

SEQ ID NO: 4058 - RNA, 208 nt, synthetic construct
  source 1..208: mol_type = other RNA
gtctgtatctatattcatcatgtttaagagcggggaaatccgcaagtttaaataaggctagtccgttatcagcgtgaaaacgcggcaccgagtcggtgctatgcctgggaccatcaaagagaatatcatctttggtgtctcatacgatgaatatagatactcaccgcggttctatctagttacgcgttaaaccaactagaattttttt

SEQ ID NO: 4059 - RNA, 208 nt, synthetic construct
  source 1..208: mol_type = other RNA
gtctgtatctatattcatcatgtttaagagcggggaaatccgcaagtttaaataaggctagtccgttatcagcgtgaaaacgcggcaccgagtcggtgctatgcctgggaccatcaaagagaatatcatctttggtgtctcatatgatgaatatagatactcaccgcggttctatctagttacgcgttaaaccaactagaattttttt

SEQ ID NO: 4060 - RNA, 208 nt, synthetic construct
  source 1..208: mol_type = other RNA
gtctgtatctatattcatcatgtttaagagcggggaaatccgcaagtttaaataaggctagtccgttatcagcgtgaaaacgcggcaccgagtcggtgctatgcctgggaccatcaaagagaatatcatctttggtgtttcatatgatgaatatagatactcaccgcggttctatctagttacgcgttaaaccaactagaattttttt

SEQ ID NO: 4061 - RNA, 208 nt, synthetic construct
  source 1..208: mol_type = other RNA
gtctgtatctatattcatcatgtttaagagcggggaaatccgcaagtttaaataaggctagtccgttatcagcgtgaaaacgcggcaccgagtcggtgctatgcctgggaccattaaagaaaatatcatctttggtgtctcatacgatgaatatagatactcaccgcggttctatctagttacgcgttaaaccaactagaattttttt

SEQ ID NO: 4062 - RNA, 208 nt, synthetic construct
  source 1..208: mol_type = other RNA
gtctgtatctatattcatcatgtttaagagcggggaaatccgcaagtttaaataaggctagtccgttatcagcgtgaaaacgcggcaccgagtcggtgctatgcctgggaccattaaagaaaatatcatctttggtgtctcatatgatgaatatagatactcaccgcggttctatctagttacgcgttaaaccaactagaattttttt

SEQ ID NO: 4063 - RNA, 208 nt, synthetic construct
  source 1..208: mol_type = other RNA
gtctgtatctatattcatcatgtttaagagcggggaaatccgcaagtttaaataaggctagtccgttatcagcgtgaaaacgcggcaccgagtcggtgctatgcctgggaccattaaagaaaatatcatctttggtgtttcatacgatgaatatagatactcaccgcggttctatctagttacgcgttaaaccaactagaattttttt

SEQ ID NO: 4064 - RNA, 208 nt, synthetic construct
  source 1..208: mol_type = other RNA
gtctgtatctatattcatcatgtttaagagcggggaaatccgcaagtttaaataaggctagtccgttatcagcgtgaaaacgcggcaccgagtcggtgctatgcctgggaccattaaagaaaatatcatctttggtgtttcatatgatgaatatagatactcaccgcggttctatctagttacgcgttaaaccaactagaattttttt

SEQ ID NO: 4065 - RNA, 208 nt, synthetic construct
  source 1..208: mol_type = other RNA
gtctgtatctatattcatcatgtttaagagcggggaaatccgcaagtttaaataaggctagtccgttatcagcgtgaaaacgcggcaccgagtcggtgctatgcctgggaccattaaagagaatatcatctttggtgtctcatacgatgaatatagatactcaccgcggttctatctagttacgcgttaaaccaactagaattttttt

SEQ ID NO: 4066 - RNA, 208 nt, synthetic construct
  source 1..208: mol_type = other RNA
gtctgtatctatattcatcatgtttaagagcggggaaatccgcaagtttaaataaggctagtccgttatcagcgtgaaaacgcggcaccgagtcggtgctatgcctgggaccattaaagagaatatcatctttggtgtctcatatgatgaatatagatactcaccgcggttctatctagttacgcgttaaaccaactagaattttttt

SEQ ID NO: 4067 - RNA, 208 nt, synthetic construct
  source 1..208: mol_type = other RNA
gtctgtatctatattcatcatgtttaagagcggggaaatccgcaagtttaaataaggctagtccgttatcagcgtgaaaacgcggcaccgagtcggtgctatgcctgggaccattaaagagaatatcatctttggtgtttcatacgatgaatatagatactcaccgcggttctatctagttacgcgttaaaccaactagaattttttt

SEQ ID NO: 4068 - RNA, 208 nt, synthetic construct
  source 1..208: mol_type = other RNA
gtctgtatctatattcatcatgtttaagagcggggaaatccgcaagtttaaataaggctagtccgttatcagcgtgaaaacgcggcaccgagtcggtgctatgcctgggaccattaaagagaatatcatctttggtgtttcatatgatgaatatagatactcaccgcggttctatctagttacgcgttaaaccaactagaattttttt

SEQ ID NO: 4069-4071 - skipped (3 entries)

SEQ ID NO: 4072 - protein, 503 aa, synthetic construct
TLNIEDEYRLHETSKEPDVSLGSTWLSDFPQAWAETGGMGLAVRQAPLIIPLKATSTPVSIKQYPMSQEARLGIKPHIQRLLDQGILVPCQSPWNTPLLPVKKPGTNDYRPVQDLREVNKRVEDIHPTVPNPYNLLSGLPPSHQWYTVLDLKDAFFCLRLHPTSQPLFAFEWRDPEMGISGQLTWTRLPQGFKNSPTLFNEALHRDLADFRIQHPDLILLQYVDDLLLAATSELDCQQGTRALLQTLGNLGYRASAKKAQICQKQVKYLGYLLKEGQRWLTEARKETVMGQPTPKTPRQLREFLGKAGFCRLFIPGFAEMAAPLYPLTKPGTLFNWGPDQQKAYQEIKQALLTAPALGLPDLTKPFELFVDEKQGYAKGVLTQKLGPWRRPVAYLSKKLDPVAAGWPPCLRMVAAIAVLTKDAGKLTMGQPLVILAPHAVEALVKQPPDRWLSNARMTHYQALLLDTDRVQFGPVVALNPATLLPLPEEGLQHNCLDNSRLIN